(19) United States
(12) Patent Application Publication
(10) Pub. No.: US 2003/0203870 A1
(43) Pub. Date: Oct. 30, 2003

(54) Method and reagent for the inhibition of NOGO and NOGO receptor genes

(75) Inventors: Lawrence Blatt, San Francisco, CA (US); James McSwiggen, Boulder, CO (US); Bharat M. Chowrira, Louisville, CO (US); Peter Haeberli, Berthoud, CO (US)

Correspondence Address: McDonnell Boehnen Hulbert & Berghoff, 32nd Floor, 300 S. Wacker Drive, Chicago, IL, 60606, US

(73) Assignee: Ribozyme Pharmaceuticals, Inc.

(21) Appl. No.: 10/430,882

(22) Filed: May 6, 2003

Related U.S. Application Data
(63) Continuation of application No. 09/827,395, filed on Apr. 5, 2001, now abandoned.
Application No. 09/827,395 is a continuation-in-part of application No. 09/780,533, filed on Feb. 9, 2001, now abandoned.
(63) Continuation-in-part of application No. PCT/US01/04273, filed on Feb. 9, 2001.
(63) Continuation-in-part of application No. PCT/US02/10512, filed on Apr. 3, 2002.
Application No. PCT/US02/10512 is a continuation-in-part of application No. 09/827,395, filed on Apr. 5, 2001, now abandoned.
Application No. 09/827,395 is a continuation-in-part of application No. 09/780,533, filed on Feb. 9, 2001, now abandoned.
(60) Provisional application No. 60/181,797, filed on Feb. 11, 2000.
(60) Provisional application No. 60/181,797, filed on Feb. 11, 2000.
(60) Provisional application No. 60/181,797, filed on Feb. 11, 2000.

(51) Int. Cl. A61K 48/00; C07H 21/04

(52) U.S. Cl. 514/44; 536/23.2; 536/23.5

(57) ABSTRACT

The present invention relates to nucleic acid molecules, including antisense and enzymatic nucleic acid molecules, such as hammerhead ribozymes, DNAzymes, and antisense, which modulate the expression of NOGO and NOGO receptor genes.

### BACKGROUND OF THE INVENTION

[0001] This patent application is a continuation-in-part of Blatt, U.S. Ser. No. 09/780,533 filed Feb. 9, 2001, entitled “METHOD AND REAGENT FOR THE INHIBITION OF NOGO GENE” which claims priority from Blatt, U.S. S No. 60/181,797, filed Feb. 11, 2000, entitled “METHOD AND REAGENT FOR THE INHIBITION OF NOGO GENE”. This application is hereby incorporated by reference herein in its entirety including the drawings.

[0002] The Sequence Listing file named “MBHB00-878-C Sequence Listing” submitted on Compact Disc-Recordable (CD-R) medium (“010404-_{—}1540”) submitted in duplicate is in compliance with 37 C.F.R. §1.52(e) is incorporated herein by reference.

[0003] The present invention provides compounds, compositions, and methods for the study, diagnosis, and treatment of conditions relating to the expression of NOGO and NOGO receptor genes. In particular, the invention provides nucleic acid molecules that are used to modulate the expression of NOGO and NOGO receptor gene products.

[0004] The following is a brief description of the current understanding of NOGO and NOGO receptors. The discussion is not meant to be complete and is provided only to assist understanding the invention that follows. The summary is not an admission that any of the work described below is prior art to the claimed invention.

[0005] The ceased growth of neurons following development has severe implications for lesions of the central nervous system (CNS) caused by neurodegenerative disorders and traumatic accidents. Although CNS neurons have the capacity to rearrange their axonal and dendritic foci in the developed brain, the regeneration of severed CNS axons spanning distance does not exist. Axonal growth following CNS injury is limited by the local tissue environment rather than intrinsic factors, as indicated by transplantation experiments (Richardson et al., 1980, Nature, 284, 264-265). Non-neuronal glial cells of the CNS, including oligodendrocytes and astrocytes, have been shown to inhibit the axonal growth of dorsal root ganglion neurons in culture (Schwab and Thoenen, 1985, J. Neurosci., 5, 2415-2423). Cultured dorsal root ganglion cells can extend their axons across glial cells from the peripheral nervous system, (ie; Schwann cells), but are inhibited by oligodendrocytes and myelin of the CNS (Schwab and Caroni, 1988, J. Neurosci., 8, 2381-2393).

[0006] The non-conducive properties of CNS tissue in adult vertebrates is thought to result from the existence of inhibitory factors rather than the lack of growth factors. The identification of proteins with neurite outgrowth inhibitory or repulsive properties include NI-35, NI-250 (Caroni and Schwab, 1988, Neuron, 1, 85-96), myelin-associated glycoprotein (Genbank Accession No M29273), tenascin-R (Genbank Accession No X98085), and NG-2 (Genbank Accession No X61945). Monoclonal antibodies (mAb IN-1) raised against NI-35/250 have been shown to partially neutralize the growth inhibitory effect of CNS myelin and oligodendrocytes. IN-1 treatment in vivo has resulted in long distance fiber regeneration in lesioned adult mammalian CNS tissue (Weibel et al., 1994, Brain Res., 642, 259-266). Additionally, IN-1 treatment in vivo has resulted in the recovery of specific reflex and locomotor functions after spinal cord injury in adult rats (Bregman et al., 1995, Nature, 378, 498-501).

[0007] Recently, the cloning of NOGO-A (Genbank Accession No AJ242961), the rat complementary DNA encoding NI-220/250 has been reported (Chen et al., 2000, Nature, 403, 434-439). The NOGO gene encodes at least three major protein products (NOGO-A, NOGO-B, and NOGO-C) resulting from both alternative promoter usage and alternative splicing. Recombinant NOGO-A inhibits neurite outgrowth from dorsal root ganglia and the spreading of 3T3 firboblasts. Monoclonal antibody IN-1 recognizes NOGO-A and neutralizes NOGO-A inhibition of neuronal growth in vitro. Evidence supports the proposal that NOGO-A is the previously described rat NI-250 since NOGO-A contains all six peptide sequences obtained from purified bNI-220, the bovine equivalent of rat NI-250 (Chen et al supra).

[0008] Prinjha et al., 2000, Nature, 403, 383-384, report the cloning of the human NOGO gene which encodes three different NOGO isoforms that are potent inhibitors of neurite outgrowth. Using oligonucleotide primers to amplify and clone overlapping regions of the open reading frame of NOGO cDNA, Phrinjha et al., supra identified three forms of cDNA clone corresponding to the three protein isoforms. The longest ORF of 1,192 amino acids corresponds to NOGO-A (Accession No. AJ251383). An intermediate-length splice variant that lacks residues 186-1,004 corresponds to NOGO-B (Accession No. AJ251384). The shortest splice variant, NOGO-C (Accession No. AJ251385), appears to be the previously described rat vp20 (Accession No. AF051335) and foocen-s (Accession No. AF132048), and also lacks residues 186-1,004. According to Prinjha et al., supra, the NOGO amino-terminal region shows no significant homology to any known protein, while the carboxy-terminal tail shares homology with neuroendocrine-specific proteins and other members of the reticulon gene family. In addition, the carboxy-terminal tail contains a consensus sequence that may serve as an endoplasmic-reticulum retention region. Based on the NOGO protein sequence, Prinjha et al., supra, postulate NOGO to be a membrane associated protein comprising a putative large extracellular domain of 1,024 residues with seven predicted N-linked glycosylation sites, two or three transmembrane domains, and a short carboxy-terminal region of 43 residues.

[0009] Grandpre et al., 2000, Nature, also report the identification of NOGO as a potent inhibitor of axon regeneration. The 4.1 kilobase NOGO human cDNA clone identified by Grandpre et al., supra, KIAA0886, is homologous to a cDNA derived from a previous effort to sequence random high molecular-weight brain derived cDNAs (Nagase et al., 1998, DNA Res., 31, 355-364). This cDNA clone encodes a protein that matches all six of the peptide sequences derived from bovine NOGO. Grandpre et al., supra demonstrate that NOGO expression is predominantly associated with the CNS and not the peripheral nervous system (PNS). Cellular localization of NOGO protein appears to be predominantly reticluar in origin, however, NOGO is found on the surface of some oligodentrocytes. An active domain of NOGO has been identified, defined as residues 31-55 of a hydrophilic 66-residue lumenal/extracellular domain. A synthetic fragment corresponding to this sequence exhibits growth-cone collapsing and outgrowth inhibiting activities (Grandpre et al., supra).

[0010] A receptor for the NOGO-A extracellular domain (NOGO-66) is described in Fournier et al., 2001, Nature, 409, 341-346. Fournier et al., have shown that isolated NOGO-66 inhibits axonal extension but does not alter non-neuronal cell morphology. The receptor identified has a high affinity for soluble NOGO-66, and is expressed as a glycophosphatidylinostitol-linked protein on the surface of CNS neurons. Furthermore, the expression of the NOGO-66 receptor in neurons that are NOGO insensitive results in NOGO dependent inhibition of axonal growth in these cells. Cleavage of the NOGO-66 receptor and other glycophosphatidylinostitol-linked proteins from axonal surfaces renders neurons insensitive to NOGO-66 inhibition. As such, disruption of the interaction between NOGO-66 and the NOGO-66 receptor provides the possibility of treating a wide variety of neurological diseases, injuries, and conditions.

[0011] Hauswirth and Flannery, International PCT Publication No. WO 98/48027, describe materials and methods for the specific expression of proteins in retinal photoreceptor cells consisting of an adeno-associated viral vector contacting a rod or cone-opsin promoter. In addition, ribozymes which degrade mutant mRNA are described for use in the treatment of retinitis pigmentosa.

[0012] Fechteler et al., Interanational PCT Publication No. WO 00/03004 describe ribozymes targeting presenilin-2 RNA for the use in treating neurodegenerative diseases such as Alzheimer's disease.

[0013] Eldadah et al., 2000, J. Neurosci., 20, 179-186, describe the protection of cerebellar granule cells from apoptosis induced by serum-potassium deprivation from ribozyme mediated inhibition of caspase-3.

[0014] Seidman et al., 1999, Antisense Nucleic Acid Drug Dev., 9, 333-340, describe in general terms, the use of antisense and ribozyme constructs for treatment of neurodegenerative diseases.

[0015] Denman et al., 1994, Nucleic Acids Research, 22, 2375-82, describe the ribozyme mediated degradation of beta-amyloid peptide precursor mRNA in COS-7 cells.

[0016] Schwab and Chen, International PCT publication No. WO 00/31235, describe NOGO proteins and inhibitors of NOGO

### SUMMARY OF THE INVENTION

[0017] The invention features novel nucleic acid-based molecules [e.g., enzymatic nucleic acid molecules (ribozymes), antisense nucleic acids, 2-5A antisense chimeras, triplex DNA, decoy RNA, aptamers, antisense nucleic acids containing RNA cleaving chemical groups] and methods to modulate gene expression, for example, genes encoding certain myelin proteins that inhibit or are involved in the inhibition of neurite growth, including axonal regeneration in the CNS. In particular, the instant invention features nucleic-acid based techniques to inhibit the expression of NOGO-A (Accession No. AJ251383), NOGO-B (Accession No. AJ251384), and/or NOGO-C (Accession No. AJ251385), NOGO-66 receptor (Accession No AF283463, Fournier et al., 2001, Nature, 409, 341-346), NI-35, NI-220, and/or NI-250, myelin-associated glycoprotein (Genbank Accession No M29273), tenascin-R (Genbank Accession No X98085), and NG-2 (Genbank Accession No X61945).

[0018] In a preferred embodiment, the invention features the use of one or more of the nucleic acid-based techniques independently or in combination to inhibit the expression of the gene(s) encoding NOGO-A, NOGO-B, NOGO-C, NI-35, NI-220, NI-250, myelin-associated glycoprotein, tenascin-R, NG-2 and/or their corresponding receptors. Specifically, the invention features the use of nucleic acid-based techniques to specifically inhibit the expression of NOGO gene (Genbank Accession No. AB020693) and NOGO-66 receptor (Genbank Accession No. AF283463).

[0019] The description below of the various aspects and embodiments is provided with reference to the exemplary NOGO-A and NOGO-66 receptor genes. However, the various aspects and embodiments are also directed to other genes which express NOGOA-like inhibitor proteins and other receptors involved in neurite outgrowth inhibition. Those additional genes can be analyzed for target sites using the methods described for NOGO and the NOGO-66 receptor, referred to alternatively as NOGO receptor. Thus, the inhibition and the effects of such inhibition of the other genes can be performed as described herein.

[0020] In one embodiment, the invention features the use of an enzymatic nucleic acid molecule, preferably in the hammerhead, NCH, G-cleaver, amberzyme, zinzyme and/or DNAzyme motif, to inhibit the expression of NOGO and/or NOGO receptor genes.

[0021] By “inhibit” it is meant that the activity of NOGO or NOGO receptor or level of RNAs or equivalent RNAs encoding one or more protein subunits of NOGO-A, NOGO-B, NOGO-C and/or NOGO receptors is down-regulated or reduced below that observed in the absence of the nucleic acid molecules of the invention. In one embodiment, inhibition with enzymatic nucleic acid molecule preferably is below that level observed in the presence of an enzymatically inactive or attenuated molecule that is able to bind to the same site on the target RNA, but is unable to cleave that RNA. In another embodiment, inhibition with antisense oligonucleotides is preferably below that level observed in the presence of, for example, an oligonucleotide with scrambled sequence or with mismatches. In another embodiment, inhibition of NOGO genes with the nucleic acid molecule of the instant invention is greater in the presence of the nucleic acid molecule than in its absence.

[0022] By “enzymatic nucleic acid molecule” it is meant a nucleic acid molecule which has complementarity in a substrate binding region to a specified gene target, and also has an enzymatic activity which is active to specifically cleave target RNA. That is, the enzymatic nucleic acid molecule is able to intermolecularly cleave RNA and thereby inactivate a target RNA molecule. These complementary regions allow sufficient hybridization of the enzymatic nucleic acid molecule to the target RNA and thus permit cleavage. One hundred percent complementarity is preferred, but complementarity as low as 50-75% can also be useful in this invention (see for example Werner and Uhlenbeck, 1995, Nucleic Acids Research, 23, 2092-2096; Hammann et al., 1999, Antisense and Nucleic Acid Drug Dev., 9, 25-31). The nucleic acids can be modified at the base, sugar, and/or phosphate groups. The term enzymatic nucleic acid is used interchangeably with phrases such as ribozymes, catalytic RNA, enzymatic RNA, catalytic DNA, aptazyme or aptamer-binding ribozyme, regulatable ribozyme, catalytic oligonucleotides, nucleozyme, DNAzyme, RNA enzyme, endoribonuclease, endonuclease, minizyme, leadzyme, oligozyme or DNA enzyme. All of these terminologies describe nucleic acid molecules with enzymatic activity. The specific enzymatic nucleic acid molecules described in the instant application are not limiting in the invention and those skilled in the art will recognize that all that is important in an enzymatic nucleic acid molecule of this invention is that it has a specific substrate binding site which is complementary to one or more of the target nucleic acid regions, and that it have nucleotide sequences within or surrounding that substrate binding site which impart a nucleic acid cleaving and/or ligation activity to the molecule (Cech et al., U.S. Pat. No. 4,987,071; Cech et al., 1988, 260 JAMA 3030).

[0023] By “nucleic acid molecule” as used herein is meant a molecule having nucleotides. The nucleic acid can be single, double, or multiple stranded and can comprise modified or unmodified nucleotides or non-nucleotides or various mixtures and combinations thereof.

[0024] By “enzymatic portion” or “catalytic domain” is meant that portion/region of the enzymatic nucleic acid molecule essential for cleavage of a nucleic acid substrate (for example see FIG. 1).

[0025] By “substrate binding arm” or “substrate binding domain” is meant that portion/region of a enzymatic nucleic acid which is able to interact, for example via complementarity (i.e., able to base-pair with), with a portion of its substrate. Preferably, such complementarity is 100%, but can be less if desired. For example, as few as 10 bases out of 14 can be base-paired (see for example Werner and Uhlenbeck, 1995, Nucleic Acids Research, 23, 2092-2096; Hammann et al., 1999, Antisense and Nucleic Acid Drug Dev., 9, 25-31). Examples of such arms are shown generally in FIGS. 1-4. That is, these arms contain sequences within a enzymatic nucleic acid which are intended to bring enzymatic nucleic acid and target RNA together through complementary base-pairing interactions. The enzymatic nucleic acid of the invention can have binding arms that are contiguous or non-contiguous and may be of varying lengths. The length of the binding arm(s) are preferably greater than or equal to four nucleotides and of sufficient length to stably interact with the target RNA; preferably 12-100 nucleotides; more preferably 14-24 nucleotides long (see for example Werner and Uhlenbeck, supra; Hamman et al., supra; Hampel et al., EP0360257; Berzal-Herrance et al., 1993, EMBO J., 12, 2567-73). If two binding arms are chosen, the design is such that the length of the binding arms are symmetrical (i.e., each of the binding arms is of the same length; e.g., five and five nucleotides, or six and six nucleotides, or seven and seven nucleotides long) or asymmetrical (i.e., the binding arms are of different length; e.g., six and three nucleotides; three and six nucleotides long; four and five nucleotides long; four and six nucleotides long; four and seven nucleotides long; and the like).

[0026] By “Inozyme” or “NCH” motif is meant, an enzymatic nucleic acid molecule comprising a motif as is generally described as NCH Rz in FIG. 2. Inozymes possess endonuclease activity to cleave RNA substrates having a cleavage triplet NCH/, where N is a nucleotide, C is cytidine and H is adenosine, uridine or cytidine, and/represents the cleavage site. H is used interchangeably with X. Inozymes can also possess endonuclease activity to cleave RNA substrates having a cleavage triplet NCN/, where N is a nucleotide, C is cytidine, and/represents the cleavage site. “I” in FIG. 2 represents an Inosine nucleotide, preferably a ribo-Inosine or xylo-Inosine nucleoside.

[0027] By “G-cleaver” motif is meant, an enzymatic nucleic acid molecule comprising a motif as is generally described as G-cleaver Rz in FIG. 2. G-cleavers possess endonuclease activity to cleave RNA substrates having a cleavage triplet NYN/, where N is a nucleotide, Y is uridine or cytidine and/represents the cleavage site. G-cleavers can be chemically modified as is generally shown in FIG. 2.

[0028] By “amberzyme” motif is meant, an enzymatic nucleic acid molecule comprising a motif as is generally described in FIG. 3. Amberzymes possess endonuclease activity to cleave RNA substrates having a cleavage triplet NG/N, where N is a nucleotide, G is guanosine, and/represents the cleavage site. Amberzymes can be chemically modified to increase nuclease stability through substitutions as are generally shown in FIG. 3. In addition, differing nucleoside and/or non-nucleoside linkers can be used to substitute the 5′-gaaa-3′ loops shown in the figure. Amberzymes represent a non-limiting example of an enzymatic nucleic acid molecule that does not require a ribonucleotide (2′-OH) group within its own nucleic acid sequence for activity.

[0029] By “zinzyme” motif is meant, an enzymatic nucleic acid molecule comprising a motif as is generally described in FIG. 4. Zinzymes possess endonuclease activity to cleave RNA substrates having a cleavage triplet including but not limited to YG/Y, where Y is uridine or cytidine, and G is guanosine and/represents the cleavage site. Zinzymes can be chemically modified to increase nuclease stability through substitutions as are generally shown in FIG. 4, including substituting 2′-O-methyl guanosine nucleotides for guanosine nucleotides. In addition, differing nucleotide and/or non-nucleotide linkers can be used to substitute the 5′-gaaa-2′ loop shown in the figure. Zinzymes represent a non-limiting example of an enzymatic nucleic acid molecule that does not require a ribonucleotide (2′-OH) group within its own nucleic acid sequence for activity.

[0030] By ‘DNAzyme’ is meant, an enzymatic nucleic acid molecule that does not require the presence of a 2′-OH group for its activity. In particular embodiments the enzymatic nucleic acid molecule can have an attached linker(s) or other attached or associated groups, moieties, or chains containing one or more nucleotides with 2′-OH groups. DNAzymes can be synthesized chemically or expressed endogenously in vivo, by means of a single stranded DNA vector or equivalent thereof. An example of a DNAzyme is shown in FIG. 5 and is generally reviewed in Usman et al., International PCT Publication No. WO 95/11304; Chartrand et al., 1995, NAR 23, 4092; Breaker et al., 1995, Chem. Bio. 2, 655; Santoro et al., 1997, PNAS 94, 4262; Breaker, 1999, Nature Biotechnology, 17, 422-423; and Santoro et. al., 2000, J. Am. Chem. Soc., 122, 2433-39. Additional DNAzyme motifs can be selected for using techniques similar to those described in these references, and hence, are within the scope of the present invention.

[0031] By “sufficient length” is meant an oligonucleotide of greater than or equal to 3 nucleotides that is of a length great enough to provide the intended function under the expected condition. For example, for binding arms of enzymatic nucleic acid “sufficient length” means that the binding arm sequence is long enough to provide stable binding to a target site under the expected binding conditions. Preferably, the binding arms are not so long as to prevent useful turnover of the nucleic acid molecule.

[0032] By “stably interact” is meant interaction of the oligonucleotides with target nucleic acid (e.g., by forming hydrogen bonds with complementary nucleotides in the target under physiological conditions) that is sufficient to the intended purpose (e.g., cleavage of target RNA by an enzyme).

[0033] By “equivalent” RNA to NOGO is meant to include those naturally occurring RNA molecules having homology (partial or complete) to NOGO-A, NOGO-B, NOGO-C and/or NOGO receptor proteins or encoding for proteins with similar function as NOGO or NOGO receptor proteins in various organisms, including human, rodent, primate, rabbit, pig, protozoans, fungi, plants, and other microorganisms and parasites. The equivalent RNA sequence also includes in addition to the coding region, regions such as 5′-untranslated region, 3′-untranslated region, introns, intron-exon junction and the like.

[0034] By “homology” is meant the nucleotide sequence of two or more nucleic acid molecules is partially or completely identical.

[0035] By “antisense nucleic acid”, it is meant a non-enzymatic nucleic acid molecule that binds to target RNA by means of RNA-RNA or RNA-DNA or RNA-PNA (protein nucleic acid; Egholm et al., 1993 Nature 365, 566) interactions and alters the activity of the target RNA (for a review, see Stein and Cheng, 1993 Science 261, 1004 and Woolf et al., U.S. Pat. No. 5,849,902). Typically, antisense molecules are complementary to a target sequence along a single contiguous sequence of the antisense molecule. However, in certain embodiments, an antisense molecule can bind to substrate such that the substrate molecule forms a loop, and/or an antisense molecule can bind such that the antisense molecule forms a loop. Thus, the antisense molecule can be complementary to two (or even more) non-contiguous substrate sequences or two (or even more) non-contiguous sequence portions of an antisense molecule can be complementary to a target sequence or both. For a review of current antisense strategies, see Schmajuk et al., 1999, J. Biol. Chem., 274, 21783-21789, Delihas et al., 1997, Nature, 15, 751-753, Stein et al., 1997, Antisense N. A. Drug Dev., 7, 151, Crooke, 2000, Methods Enzymol., 313, 3-45; Crooke, 1998, Biotech. Genet. Eng. Rev., 15, 121-157, Crooke, 1997, Ad. Pharmacol., 40, 1-49. In addition, antisense DNA can be used to target RNA by means of DNA-RNA interactions, thereby activating RNase H, which digests the target RNA in the duplex. The antisense oligonucleotides can comprise one or more RNAse H activating region, which is capable of activating RNAse H cleavage of a target RNA. Antisense DNA can be synthesized chemically or expressed via the use of a single stranded DNA expression vector or equivalent thereof.

[0036] By “RNase H activating region” is meant a region (generally greater than or equal to 4-25 nucleotides in length, preferably from 5-11 nucleotides in length) of a nucleic acid molecule capable of binding to a target RNA to form a non-covalent complex that is recognized by cellular RNase H enzyme (see for example Arrow et al., U.S. Pat. No. 5,849,902; Arrow et al., U.S. Pat. No. 5,989,912). The RNase H enzyme binds to the nucleic acid molecule-target RNA complex and cleaves the target RNA sequence. The RNase H activating region comprises, for example, phosphodiester, phosphorothioate (preferably at least four of the nucleotides are phosphorothiote substitutions; more specifically, 4-11 of the nucleotides are phosphorothiote substitutions); phosphorodithioate, 5′-thiophosphate, or methylphosphonate backbone chemistry or a combination thereof. In addition to one or more backbone chemistries described above, the RNase H activating region can also comprise a variety of sugar chemistries. For example, the RNase H activating region can comprise deoxyribose, arabino, fluoroarabino or a combination thereof, nucleotide sugar chemistry. Those skilled in the art will recognize that the foregoing are non-limiting examples and that any combination of phosphate, sugar and base chemistry of a nucleic acid that supports the activity of RNase H enzyme is within the scope of the definition of the RNase H activating region and the instant invention.

[0037] By “2-5A antisense chimera” is meant an antisense oligonucleotide containing a 5′-phosphorylated 2′-5′-linked adenylate residue. These chimeras bind to target RNA in a sequence-specific manner and activate a cellular 2-5A-dependent ribonuclease which, in turn, cleaves the target RNA (Torrence et al., 1993 Proc. Natl. Acad. Sci. USA 90, 1300; Silverman et al., 2000, Methods Enzymol., 313, 522-533; Player and Torrence, 1998, Pharmacol. Ther., 78, 55-113).

[0038] By “triplex forming oligonucleotides” is meant an oligonucleotide that can bind to a double-stranded DNA in a sequence-specific manner to form a triple-strand helix. Formation of such triple helix structure has been shown to inhibit transcription of the targeted gene (Duval-Valentin et al., 1992 Proc. Natl. Acad. Sci. USA 89, 504; Fox, 2000, Curr. Med. Chem., 7, 17-37; Praseuth et. al., 2000, Biochim. Biophys. Acta, 1489, 181-206).

[0039] By “gene” it is meant a nucleic acid that encodes an RNA, for example, nucleic acid sequences including but not limited to structural genes encoding a polypeptide.

[0040] “Complementarity” refers to the ability of a nucleic acid to form hydrogen bond(s) with another RNA sequence by either traditional Watson-Crick or other non-traditional types. In reference to the nucleic molecules of the present invention, the binding free energy for a nucleic acid molecule with its target or complementary sequence is sufficient to allow the relevant function of the nucleic acid to proceed, e.g., enzymatic nucleic acid cleavage, antisense or triple helix inhibition. Determination of binding free energies for nucleic acid molecules is well known in the art (see, e.g., Turner et al., 1987, CSH Symp. Quant. Biol. LII pp.123-133; Frier et al., 1986, Proc. Nat. Acad. Sci. USA 83:9373-9377; Turner et al., 1987, J. Am. Chem. Soc. 109:3783-3785). A percent complementarity indicates the percentage of contiguous residues in a nucleic acid molecule which can form hydrogen bonds (e.g., Watson-Crick base pairing) with a second nucleic acid sequence (e.g., 5, 6, 7, 8, 9, 10 out of 10 being 50%, 60%, 70%, 80%, 90%, and 100% complementary). “Perfectly complementary” means that all the contiguous residues of a nucleic acid sequence will hydrogen bond with the same number of contiguous residues in a second nucleic acid sequence.

[0041] By “RNA” is meant a molecule comprising at least one ribonucleotide residue. By “ribonucleotide” or “2′-OH” is meant a nucleotide with a hydroxyl group at the 2′ position of a β-D-ribo-furanose moiety.

[0042] By “decoy RNA” is meant an RNA molecule or aptamer that is designed to preferentially bind to a predetermined ligand. Such binding can result in the inhibition or activation of a target molecule. The decoy RNA or aptamer can compete with a naturally occuring binding target for the binding of a specific ligand. For example, it has been shown that over-expression of HIV trans-activation response (TAR) RNA can act as a “decoy” and efficiently binds HIV tat protein, thereby preventing it from binding to TAR sequences encoded in the HIV RNA (Sullenger et al., 1990, Cell, 63, 601-608). This is but a specific example and those in the art will recognize that other embodiments can be readily generated using techniques generally known in the art, see for example Gold et al., 1995, Annu. Rev. Biochem., 64, 763; Brody and Gold, 2000, J. Biotechnol., 74, 5; Sun, 2000, Curr. Opin. Mol. Ther., 2, 100; Kusser, 2000, J. Biotechnol., 74, 27; Hermann and Patel, 2000, Science, 287, 820; and Jayasena, 1999, Clinical Chemistry, 45, 1628. Similarly, a decoy RNA can be designed to bind to a NOGO receptor and block the binding of NOGO or a decoy RNA can be designed to bind to NOGO and prevent interaction with the NOGO receptor.

[0043] Several varieties of naturally-occurring enzymatic RNAs are known presently. Each can catalyze the hydrolysis of RNA phosphodiester bonds in trans (and thus can cleave other RNA molecules) under physiological conditions. Table I summarizes some of the characteristics of these ribozymes. In general, enzymatic nucleic acids act by first binding to a target RNA. Such binding occurs through the target binding portion of a enzymatic nucleic acid which is held in close proximity to an enzymatic portion of the molecule that acts to cleave the target RNA. Thus, the enzymatic nucleic acid first recognizes and then binds a target RNA through complementary base-pairing, and once bound to the correct site, acts enzymatically to cut the target RNA. Strategic cleavage of such a target RNA will destroy its ability to direct synthesis of an encoded protein. After an enzymatic nucleic acid has bound and cleaved its RNA target, it is released from that RNA to search for another target and can repeatedly bind and cleave new targets. Thus, a single ribozyme molecule is able to cleave many molecules of target RNA. In addition, the ribozyme is a highly specific inhibitor of gene expression, with the specificity of inhibition depending not only on the base-pairing mechanism of binding to the target RNA, but also on the mechanism of target RNA cleavage. Single mismatches, or base-substitutions, near the site of cleavage can completely eliminate catalytic activity of a ribozyme.

[0044] The enzymatic nucleic acid molecule that cleave the specified sites in NOGO and NOGO receptor-specific RNAs represent a novel therapeutic approach to treat a variety of pathologic indications, including but not limited to CNS injury and cerebrovascular accident (CVA, stroke), Alzheimer's disease, dementia, multiple sclerosis (MS), chemotherapy-induced neuropathy, amyotrophic lateral sclerosis (ALS), Parkinson's disease, ataxia, Huntington's disease, Creutzfeldt-Jakob disease, muscular dystrophy, and/or other neurodegenerative disease states which respond to the modulation of NOGO and NOGO receptor expression.

[0045] In one embodiment of the inventions described herein, the enzymatic nucleic acid molecule is formed in a hammerhead or hairpin motif, but can also be formed in the motif of a hepatitis delta virus, group I intron, group II intron or RNase P RNA (in association with an RNA guide sequence), Neurospora VS RNA, DNAzymes, NCH cleaving motifs, or G-cleavers. Examples of such hammerhead motifs are described by Dreyfus, supra, Rossi et al., 1992, AIDS Research and Human Retroviruses 8, 183; of hairpin motifs by Hampel et al., EP0360257, Hampel and Tritz, 1989 Biochemistry 28, 4929, Feldstein et al., 1989, Gene 82, 53, Haseloff and Gerlach, 1989, Gene, 82, 43, and Hampel et al., 1990 Nucleic Acids Res. 18, 299; Chowrira & McSwiggen, U.S. Pat. No. 5,631,359; of the hepatitis delta virus motif is described by Perrotta and Been, 1992 Biochemistry 31, 16; of the RNase P motif by Guerrier-Takada et al., 1983 Cell 35, 849; Forster and Altman, 1990, Science 249, 783; Li and Altman, 1996, Nucleic Acids Res. 24, 835; Neurospora VS RNA ribozyme motif is described by Collins (Saville and Collins, 1990 Cell 61, 685-696; Saville and Collins, 1991 Proc. Natl. Acad. Sci. USA 88, 8826-8830; Collins and Olive, 1993 Biochemistry 32, 2795-2799; Guo and Collins, 1995, EMBO. J. 14, 363); Group II introns are described by Griffin et al., 1995, Chem. Biol. 2, 761; Michels and Pyle, 1995, Biochemistry 34, 2965; Pyle et al., International PCT Publication No. WO 96/22689; of the Group I intron by Cech et al., U.S. Pat. No. 4,987,071 and of DNAzymes by Usman et al., International PCT Publication No. WO 95/11304; Chartrand et al., 1995, NAR 23, 4092; Breaker et al., 1995, Chem. Bio. 2, 655; Santoro et al., 1997, PNAS 94, 4262, and Beigelman et al., International PCT publication No. WO 99/55857. NCH cleaving motifs are described in Ludwig & Sproat, International PCT Publication No. WO 98/58058; and G-cleavers are described in Kore et al., 1998, Nucleic Acids Research 26, 4116-4120 and Eckstein et al., International PCT Publication No. WO 99/16871. Additional motifs such as the Aptazyme (Breaker et al., WO 98/43993), Amberzyme (Class I motif; FIG. 3; Beigelman et al., U.S. Ser. No. 09/301,511) and Zinzyme (FIG. 4) (Beigelman et al., U.S. Ser. No. 09/301,511), all included by reference herein including drawings, can also be used in the present invention. These specific motifs are not limiting in the invention and those skilled in the art will recognize that all that is important in an enzymatic nucleic acid molecule of this invention is that it has a specific substrate binding site which is complementary to one or more of the target gene RNA regions, and that it have nucleotide sequences within or surrounding that substrate binding site which impart an RNA cleaving activity to the molecule (Cech et al., U.S. Pat. No. 4,987,071).

[0046] In one embodiment of the present invention, a nucleic acid molecule of the instant invention can be between 12 and 100 nucleotides in length. Exemplary enzymatic nucleic acid molecules of the invention are shown in Table III-VII. For example, enzymatic nucleic acid molecules of the invention are preferably between 15 and 50 nucleotides in length, more preferably between 25 and 40 nucleotides in length, e.g., 34, 36, or 38 nucleotides in length (for example see Jarvis et al., 1996, J. Biol. Chem., 271, 29107-29112). Exemplary DNAzymes of the invention are preferably between 15 and 40 nucleotides in length, more preferably between 25 and 35 nucleotides in length, e.g., 29, 30, 31, or 32 nucleotides in length (see for example Santoro et al., 1998, Biochemistry, 37, 13330-13342; Chartrand et al., 1995, Nucleic Acids Research, 23, 4092-4096). Exemplary antisense molecules of the invention are preferably between 15 and 75 nucleotides in length, more preferably between 20 and 35 nucleotides in length, e.g., 25, 26, 27, or 28 nucleotides in length (see for example Woolf et al., 1992, PNAS., 89, 7305-7309; Milner et al., 1997, Nature Biotechnology, 15, 537-541). Exemplary triplex forming oligonucleotide molecules of the invention are preferably between 10 and 40 nucleotides in length, more preferably between 12 and 25 nucleotides in length, e.g., 18, 19, 20, or 21 nucleotides in length (see for example Maher et al., 1990, Biochemistry, 29, 8820-8826; Strobel and Dervan, 1990, Science, 249, 73-75). Those skilled in the art will recognize that all that is required is for the nucleic acid molecule are of length and conformation sufficient and suitable for the nucleic acid molecule to catalyze a reaction contemplated herein. The length of the nucleic acid molecules of the instant invention are not limiting within the general limits stated.

[0047] Preferably, a nucleic acid molecule that inhibits NOGO and/or NOGO receptor replication or expression comprises between 12 and 100 bases complementary to a RNA molecule of NOGO or NOGO receptor. Even more preferably, a nucleic acid molecule that inhibits NOGO or NOGO receptor replication or expression comprises between 14 and 24 bases complementary to a RNA molecule of NOGO or NOGO receptor.

[0048] In a preferred embodiment the invention provides a method for producing a class of nucleic acid-based gene inhibiting agents which exhibit a high degree of specificity for the RNA of a desired target. For example, the enzymatic nucleic acid molecule is preferably targeted to a highly conserved sequence region of target RNAs encoding NOGO-A, NOGO-B, NOGO-C and/or receptor proteins (specifically NOGO and NOGO receptor genes) such that specific treatment of a disease or condition can be provided with either one or several nucleic acid molecules of the invention. Such nucleic acid molecules can be delivered exogenously to specific tissue or cellular targets as required. Alternatively, the nucleic acid molecules (e.g., ribozymes and antisense) can be expressed from DNA and/or RNA vectors that are delivered to specific cells.

[0049] As used in herein “cell” is used in its usual biological sense, and does not refer to an entire multicellular organism. The cell can, for example, be in vitro, e.g., in cell culture, or present in amulticellular organism, including, e.g., birds, plants and mammals such as humans, cows, sheep, apes, monkeys, swine, dogs, and cats. The cell may be prokaryotic (e.g., bacterial cell) or eukaryotic (e.g., mammalian or plant cell).

[0050] By “NOGO proteins” is meant, a protein, protein receptor or a mutant protein derivative thereof, comprising neuronal inhibitor activity, preferably CNS neuronal growth inhibitor activity.

[0051] By “highly conserved sequence region” is meant, a nucleotide sequence of one or more regions in a target gene does not vary significantly from one generation to the other or from one biological system to the other.

[0052] The nucleic acid-based inhibitors of NOGO and NOGO receptor expression are useful for the prevention and/or treatment of diseases and conditions such CNS injury, cerebrovascular accident (CVA, stroke), Alzheimer's disease, dementia, multiple sclerosis (MS), chemotherapy-induced neuropathy, muscular dystrophy and any other diseases or conditions that are related to or will respond to the levels of NOGO and/or NOGO receptor in a cell or tissue, alone or in combination with other therapies. In addition, NOGO and/or NOGO receptor inhibition can be used as a therapeutic target for abrogating CNS neuronal growth inhibition; a situation that can selectively regenerate damaged or lesioned CNS tissue to restore specific reflex and/or locomotor functions.

[0053] By “related” is meant that the reduction of NOGO expression (specifically NOGO and/or NOGO receptor gene) RNA levels and thus reduction in the level of the respective protein relieves, to some extent, the symptoms of the disease or condition.

[0054] The nucleic acid-based inhibitors of the invention are added directly, or can be complexed with cationic lipids, packaged within liposomes, or otherwise delivered to target cells or tissues. The nucleic acid or nucleic acid complexes can be locally administered to relevant tissues ex vivo, or in vivo through injection or infusion pump, with or without their incorporation in biopolymers. In preferred embodiments, the enzymatic nucleic acid inhibitors comprise sequences, which are complementary to the substrate sequences in Tables III to VII. Examples of such enzymatic nucleic acid molecules also are shown in Tables III to VII. Examples of such enzymatic nucleic acid molecules consist essentially of sequences defined in these tables.

[0055] In another embodiment, the invention features antisense nucleic acid molecules and 2-5A chimera including sequences complementary to the substrate sequences shown in Tables III to VII. Such nucleic acid molecules can include sequences as shown for the binding arms of the enzymatic nucleic acid molecules in Tables III to VII. Similarly, triplex molecules can be provided targeted to the corresponding DNA target regions, and containing the DNA equivalent of a target sequence or a sequence complementary to the specified target (substrate) sequence. Typically, antisense molecules are complementary to a target sequence along a single contiguous sequence of the antisense molecule. However, in certain embodiments, an antisense molecule can bind to substrate such that the substrate molecule forms a loop, and/or an antisense molecule can bind such that the antisense molecule forms a loop. Thus, the antisense molecule can be complementary to two (or even more) non-contiguous substrate sequences or two (or even more) non-contiguous sequence portions of an antisense molecule can be complementary to a target sequence or both.

[0056] By “consists essentially of” is meant that the active nucleic acid molecule of the invention, for example, an enzymatic nucleic acid molecule, contains an enzymatic center or core equivalent to those in the examples, and binding arms able to bind RNA such that cleavage at the target site occurs. Other sequences can be present which do not interfere with such cleavage. Thus, a core region can, for example, include one or more loop, stem-loop structure, or linker which does not prevent enzymatic activity. Thus, the underlined regions in the sequences in Tables III and IV can be such a loop, stem-loop, nucleotide linker, and/or non-nucleotide linker and can be represented generally as sequence “X”. For example, a core sequence for a hammerhead enzymatic nucleic acid can comprise a conserved sequence, such as 5′-CUGAUGAG-3′ and 5′-CGAA-3′-connected by “X”, where X is 5-GCCGUUAGGC-3′ (SEQ ID NO 2604), or any other Stem II region known in the art, or a nucleotide and/or non-nucleotide linker. Similarly, for other nucleic acid molecules of the instant invention, such as Inozyme, G-cleaver, amberzyme, zinzyme, DNAzyme, antisense, 2-5A antisense, triplex forming nucleic acid, and decoy nucleic acids, other sequences or non-nucleotide linkers can be present that do not interfere with the function of the nucleic acid molecule.

[0057] Sequence X can be a linker of ≧2 nucleotides in length, preferably 3, 4, 5, 6, 7, 8, 9, 10, 15, 20, 26, 30, where the nucleotides can preferably be internally base-paired to form a stem of preferably ≧2 base pairs. Alternatively or in addition, sequence X can be a non-nucleotide linker. In yet another embodiment, the nucleotide linker X can be a nucleic acid aptamer, such as an ATP aptamer, HIV Rev aptamer (RRE), HIV Tat aptamer (TAR) and others (for a review see Gold et al., 1995, Annu. Rev. Biochem., 64, 763; and Szostak & Ellington, 1993, in The RNA World, ed. Gesteland and Atkins, pp. 511, CSH Laboratory Press). A “nucleic acid aptamer” as used herein is meant to indicate a nucleic acid sequence capable of interacting with a ligand. The ligand can be any natural or a synthetic molecule, including but not limited to a resin, metabolites, nucleosides, nucleotides, drugs, toxins, transition state analogs, peptides, lipids, proteins, amino acids, nucleic acid molecules, hormones, carbohydrates, receptors, cells, viruses, bacteria and others.

[0058] In yet another embodiment, the non-nucleotide linker X is as defined herein. The term “non-nucleotide” as used herein include either abasic nucleotide, polyether, polyamine, polyamide, peptide, carbohydrate, lipid, or polyhydrocarbon compounds. Specific examples include those described by Seela and Kaiser, Nucleic Acids Res. 1990, 18:6353 and Nucleic Acids Res. 1987, 15:3113; Cload and Schepartz, J. Am. Chem. Soc. 1991, 113:6324; Richardson and Schepartz, J. Am. Chem. Soc. 1991, 113:5109; Ma et al., Nucleic Acids Res. 1993, 21:2585 and Biochemistry 1993, 32:1751; Durand et al., Nucleic Acids Res. 1990, 18:6353; McCurdy et al., Nucleosides & Nucleotides 1991, 10:287; Jschke et al., Tetrahedron Lett. 1993, 34:301; Ono et al., Biochemistry 1991, 30:9914; Arnold et al., International Publication No. WO 89/02439; Usman et al., International Publication No. WO 95/06731; Dudycz et al., International Publication No. WO 95/11910 and Ferentz and Verdine, J. Am. Chem. Soc. 1991, 113:4000, all hereby incorporated by reference herein. A “non-nucleotide” further means any group or compound which can be incorporated into a nucleic acid chain in the place of one or more nucleotide units, including either sugar and/or phosphate substitutions, and allows the remaining bases to exhibit their enzymatic activity. The group or compound can be abasic in that it does not contain a commonly recognized nucleotide base, such as adenosine, guanine, cytosine, uracil or thymine. Thus, in a preferred embodiment, the invention features an enzymatic nucleic acid molecule having one or more non-nucleotide moieties, and having enzymatic activity to cleave an RNA or DNA molecule.

[0059] In another aspect of the invention, enzymatic nucleic acid molecules or antisense molecules that interact with target RNA molecules and inhibit NOGO (specifically NOGO and/or NOGO receptor gene) activity are expressed from transcription units inserted into DNA or RNA vectors. The recombinant vectors are preferably DNA plasmids or viral vectors. Enzymatic nucleic acid molecule or antisense expressing viral vectors can be constructed based on, but not limited to, adeno-associated virus, retrovirus, adenovirus, or alphavirus. Preferably, the recombinant vectors capable of expressing the enzymatic nucleic acid molecules or antisense are delivered as described above, and persist in target cells. Alternatively, viral vectors can be used that provide for transient expression of enzymatic nucleic acid molecules or antisense. Such vectors can be repeatedly administered as necessary. Once expressed, the enzymatic nucleic acid molecules or antisense bind to the target RNA and inhibit its function or expression. Delivery of enzymatic nucleic acid molecule or antisense expressing vectors can be systemic, such as by intravenous or intramuscular administration, by administration to target cells ex-planted from the patient followed by reintroduction into the patient, or by any other means that would allow for introduction into the desired target cell. Antisense DNA can be expressed via the use of a single stranded DNA intracellular expression vector.

[0060] By “vectors” is meant any nucleic acid- and/or viral-based technique used to deliver a desired nucleic acid.

[0061] By “patient” is meant an organism, which is a donor or recipient of explanted cells or the cells themselves. “Patient” also refers to an organism to which the nucleic acid molecules of the invention can be administered. Preferably, a patient is a mammal or mammalian cells. More preferably, a patient is a human or human cells.

[0062] By “enhanced enzymatic activity” is meant to include activity measured in cells and/or in vivo where the activity is a reflection of both the catalytic activity and the stability of the nucleic acid molecules of the invention. In this invention, the product of these properties can be increased in vivo compared to an all RNA enzymatic nucleic acid or all DNA enzyme. In some cases, the activity or stability of the nucleic acid molecule can be decreased (i.e., less than ten-fold), but the overall activity of the nucleic acid molecule is enhanced, in vivo.

[0063] The nucleic acid molecules of the instant invention, individually, or in combination or in conjunction with other drugs, can be used to treat diseases or conditions discussed above. For example, to treat a disease or condition associated with the levels of NOGO and/or NOGO receptor, the patient can be treated, or other appropriate cells can be treated, as is evident to those skilled in the art, individually or in combination with one or more drugs under conditions suitable for the treatment.

[0064] In a further embodiment, the described molecules, such as antisense or ribozymes, can be used in combination with other known treatments to treat conditions or diseases discussed above. For example, the described molecules can be used in combination with one or more known therapeutic agents to treat CNS injury, spinal cord injury, cerebrovascular accident (CVA, stroke), Alzheimer's disease, dementia, multiple sclerosis (MS), chemotherapy-induced neuropathy, amyotrophic lateral sclerosis (ALS), Parkinson's disease, ataxia, Huntington's disease, Creutzfeldt-Jakob disease, muscular dystrophy, and/or other neurodegenerative disease states which respond to the modulation of NOGO and/or NOGO receptor expression.

[0065] In another preferred embodiment, the invention features nucleic acid-based inhibitors (e.g., enzymatic nucleic acid molecules (eg; ribozymes), antisense nucleic acids, 2-5A antisense chimeras, triplex DNA, antisense nucleic acids containing RNA cleaving chemical groups) and methods for their use to down regulate or inhibit the expression of genes (e.g., NOGO and/or NOGO receptor) capable of progression and/or maintenance of CNS injury, spinal cord injury, cerebrovascular accident (CVA, stroke), Alzheimer's disease, dementia, multiple sclerosis (MS), chemotherapy-induced neuropathy, amyotrophic lateral sclerosis (ALS), Parkinson's disease, ataxia, Huntington's disease, Creutzfeldt-Jakob disease, muscular dystrophy, and/or other neurodegenerative disease states which respond to the modulation of NOGO and/or NOGO receptor expression.

[0066] By “comprising” is meant including, but not limited to, whatever follows the word “comprising”. Thus, use of the term “comprising” indicates that the listed elements are required or mandatory, but that other elements are optional and may or may not be present. By “consisting of” is meant including, and limited to, whatever follows the phrase “consisting of”. Thus, the phrase “consisting of” indicates that the listed elements are required or mandatory, and that no other elements may be present.

[0067] Other features and advantages of the invention will be apparent from the following description of the preferred embodiments thereof, and from the claims.

### DESCRIPTION OF THE PREFERRED EMBODIMENTS

[0068] First the drawings will be described briefly.

### DRAWINGS

[0069] FIG. 1 shows the secondary structure model for seven different classes of enzymatic nucleic acid molecules. Arrow indicates the site of cleavage. --------- indicate the target sequence. Lines interspersed with dots are meant to indicate tertiary interactions. - is meant to indicate base-paired interaction. Group I Intron: P1-P9.0 represent various stem-loop structures (Cech et al., 1994, Nature Struc. Bio., 1, 273). RNase P (M1RNA): EGS represents external guide sequence (Forster et al., 1990, Science, 249, 783; Pace et al., 1990, J. Biol. Chem., 265, 3587). Group II Intron: 5′SS means 5′ splice site; 3′SS means 3′-splice site; IBS means intron binding site; EBS means exon binding site (Pyle et al., 1994, Biochemistry, 33, 2716). VS RNA: I-VI are meant to indicate six stem-loop structures; shaded regions are meant to indicate tertiary interaction (Collins, International PCT Publication No. WO 96/19577). HDV Ribozyme: I-IV are meant to indicate four stem-loop structures (Been et al., U.S. Pat. No. 5,625,047). Hammerhead Ribozyme: I-III are meant to indicate three stem-loop structures; stems I-III can be of any length and can be symmetrical or asymmetrical (Usman et al., 1996, Curr. Op. Struct. Bio., 1, 527). Hairpin Ribozyme: Helix 1, 4 and 5 can be of any length; Helix 2 is between 3 and 8 base-pairs long; Y is a pyrimidine; Helix 2 (H2) is provided with a least 4 base pairs (i.e., n is 1, 2, 3 or 4) and helix 5 can be optionally provided of length 2 or more bases (preferably 3-20 bases, i.e., m is from 1-20 or more). Helix 2 and helix 5 can be covalently linked by one or more bases (i.e., r is ≧1 base). Helix 1, 4 or 5 can also be extended by 2 or more base pairs (e.g., 4-20 base pairs) to stabilize the ribozyme structure, and preferably is a protein binding site. In each instance, each N and N′ independently is any normal or modified base and each dash represents a potential base-pairing interaction. These nucleotides can be modified at the sugar, base or phosphate. Complete base-pairing is not required in the helices, but is preferred. Helix 1 and 4 can be of any size (i.e., o and p is each independently from 0 to any number, e.g., 20) as long as some base-pairing is maintained. Essential bases are shown as specific bases in the structure, but those in the art will recognize that one or more can be modified chemically (abasic, base, sugar and/or phosphate modifications) or replaced with another base without significant effect. Helix 4 can be formed from two separate molecules, i.e., without a connecting loop. The connecting loop when present can be a ribonucleotide with or without modifications to its base, sugar or phosphate. “q”≧is 2 bases. The connecting loop can also be replaced with a non-nucleotide linker molecule. H refers to bases A, U, or C. Y refers to pyrimidine bases. “_” refers to a covalent bond. (Burke et al., 1996, Nucleic Acids & Mol. Biol., 10, 129; Chowrira et al., U.S. Pat. No. 5,631,359).

[0070] FIG. 2 shows examples of chemically stabilized ribozyme motifs. HH Rz, represents hammerhead ribozyme motif (Usman et al., 1996, Curr. Op. Struct. Bio., 1, 527); NCH Rz represents the NCH ribozyme motif (Ludwig & Sproat, International PCT Publication No. WO 98/58058); G-Cleaver, represents G-cleaver ribozyme motif (Kore et al., 1998, Nucleic Acids Research 26, 4116-4120, Eckstein et al., Internaitional PCT publication No. WO 99/16871). N or n, represent independently a nucleotide which can be same or different and have complementarity to each other; rI, represents ribo-Inosine nucleotide; arrow indicates the site of cleavage within the target. Position 4 of the HH Rz and the NCH Rz is shown as having 2′-C-allyl modification, but those skilled in the art will recognize that this position can be modified with other modifications well known in the art, so long as such modifications do not significantly inhibit the activity of the ribozyme.

[0071] FIG. 3 shows an example of the Amberzyme ribozyme motif that is chemically stabilized (see for example Beigelman et al., International PCT publication No. WO 99/55857).

[0072] FIG. 4 shows an example of the Zinzyme A ribozyme motif that is chemically stabilized (see for example Beigelman et al., Beigelman et al., International PCT publication No. WO 99/55857).

[0073] FIG. 5 shows an example of a DNAzyme motif described by Santoro et al., 1997, PNAS, 94, 4262.

[0074] Mechanism of Action of Nucleic Acid Molecules of the Invention

[0075] Antisense: Antisense molecules can be modified or unmodified RNA, DNA, or mixed polymer oligonucleotides and primarily function by specifically binding to matching sequences resulting in inhibition of peptide synthesis (Wu-Pong, Nov 1994, BioPharm, 20-33). The antisense oligonucleotide binds to target RNA by Watson Crick base-pairing and blocks gene expression by preventing ribosomal translation of the bound sequences either by steric blocking or by activating RNase H enzyme. Antisense molecules can also alter protein synthesis by interfering with RNA processing or transport from the nucleus into the cytoplasm (Mukhopadhyay & Roth, 1996, Crit. Rev. in Oncogenesis 7, 151-190).

[0076] In addition, binding of single stranded DNA to RNA can result in nuclease degradation of the heteroduplex (Wu-Pong, supra; Crooke, supra). To date, the only backbone modified DNA chemistry which will act as substrates for RNase H are phosphorothioates, phosphorodithioates, and borontrifluoridates. Recently it has been reported that 2′-arabino and 2′-fluoro arabino-containing oligos can also activate RNase H activity.

[0077] A number of antisense molecules have been described that utilize novel configurations of chemically modified nucleotides, secondary structure, and/or RNase H substrate domains (Woolf et al., International PCT Publication No. WO 98/13526; Thompson et al., International PCT Publication No. WO 99/54459; Hartmann et al., U.S. S No. 60/101,174 which was filed on Sep. 21, 1998) all of these are incorporated by reference herein in their entirety.

[0078] In addition, antisense deoxyoligoribonucleotides can be used to target RNA by means of DNA-RNA interactions, thereby activating RNase H, which digests the target RNA in the duplex. Antisense DNA can be expressed via the use of a single stranded DNA intracellular expression vector or equivalents and variations thereof.

[0079] Triplex Forming Oligonucleotides (TFO): Single stranded DNA can be designed to bind to genomic DNA in a sequence specific manner. TFOs are comprised of pyrimidine-rich oligonucleotides which bind DNA helices through Hoogsteen Base-pairing (Wu-Pong, supra). The resulting triple helix composed of the DNA sense, DNA antisense, and TFO disrupts RNA synthesis by RNA polymerase. The TFO mechanism can result in gene expression or cell death since binding can be irreversible (Mukhopadhyay & Roth, supra).

[0080] 2-5A Antisense Chimera: The 2-5A system is an interferon mediated mechanism for RNA degradation found in higher vertebrates (Mitra et al., 1996, Proc Nat Acad Sci USA 93, 6780-6785). Two types of enzymes, 2-5A synthetase and RNase L, are required for RNA cleavage. The 2-5A synthetases require double stranded RNA to form 2′-5′ oligoadenylates (2-5A). 2-5A then acts as an allosteric effector for utilizing RNase L which has the ability to cleave single stranded RNA. The ability to form 2-5A structures with double stranded RNA makes this system particularly useful for inhibition of viral replication.

[0081] (2′-5′) oligoadenylate structures can be covalently linked to antisense molecules to form chimeric oligonucleotides capable of RNA cleavage (Torrence, supra). These molecules putatively bind and activate a 2-5A dependent RNase, the oligonucleotide/enzyme complex then binds to a target RNA molecule which can then be cleaved by the RNase enzyme.

[0082] Enzymatic Nucleic Acid: Several varieties of naturally-occurring enzymatic RNAs are presently known. In addition, several in vitro selection (evolution) strategies (Orgel, 1979, Proc. R. Soc. London, B 205, 435) have been used to evolve new nucleic acid catalysts capable of catalyzing cleavage and ligation of phosphodiester linkages (Joyce, 1989, Gene, 82, 83-87; Beaudry et al., 1992, Science 257, 635-641; Joyce, 1992, Scientific American 267, 90-97; Breaker et al., 1994, TIBTECH 12, 268; Bartel et al., 1993, Science 261:1411-1418; Szostak, 1993, TIBS 17, 89-93; Kumar et al., 1995, FASEB J., 9, 1183; Breaker, 1996, Curr. Op. Biotech., 7, 442; Santoro et al., 1997, Proc. Natl. Acad. Sci., 94, 4262; Tang et al., 1997, RNA 3, 914; Nakamaye & Eckstein, 1994, supra; Long & Uhlenbeck, 1994, supra; Ishizaka et al., 1995, supra; Vaish et al., 1997, Biochemistry 36, 6495; all of these are incorporated by reference herein). Each can catalyze a series of reactions including the hydrolysis of phosphodiester bonds in trans (and thus can cleave other RNA molecules) under physiological conditions.

[0083] Nucleic acid molecules of this invention will block to some extent NOGO-A, NOGO-B, and/or NOGO-C protein expression and can be used to treat disease or diagnose disease associated with the levels of NOGO-A, NOGO-B, and/or NOGO-C.

[0084] The enzymatic nature of an enzymatic nucleic acid molecule has significant advantages, one advantage being that the concentration of enzymatic nucleic acid molecule necessary to affect a therapeutic treatment is lower. This advantage reflects the ability of the enzymatic nucleic acid molecule to act enzymatically. Thus, a single enzymatic nucleic acid molecule molecule is able to cleave many molecules of target RNA. In addition, the enzymatic nucleic acid molecule is a highly specific inhibitor, with the specificity of inhibition depending not only on the base-pairing mechanism of binding to the target RNA, but also on the mechanism of target RNA cleavage. Single mismatches, or base-substitutions, near the site of cleavage can be chosen to completely eliminate catalytic activity of a enzymatic nucleic acid molecule.

[0085] Nucleic acid molecules having an endonuclease enzymatic activity are able to repeatedly cleave other separate RNA molecules in a nucleotide base sequence-specific manner. Such enzymatic nucleic acid molecules can be targeted to virtually any RNA transcript, and achieved efficient cleavage in vitro (Zaug et al., 324, Nature 429 1986; Uhlenbeck, 1987 Nature 328, 596; Kim et al., 84 Proc. Natl. Acad. Sci. USA 8788, 1987; Dreyfus, 1988, Einstein Quart. J. Bio. Med., 6, 92; Haseloff and Gerlach, 334 Nature 585, 1988; Cech, 260 JAMA 3030, 1988; and Jefferies et al., 17 Nucleic Acids Research 1371, 1989; Santoro et al., 1997 supra).

[0086] Because of their sequence specificity, trans-cleaving enzymatic nucleic acid molecules can be used as therapeutic agents for human disease (Usman & McSwiggen, 1995 Ann. Rep. Med. Chem. 30, 285-294; Christoffersen and Marr, 1995 J. Med. Chem. 38, 2023-2037). Enzymatic nucleic acid molecules can be designed to cleave specific RNA targets within the background of cellular RNA. Such a cleavage event renders the RNA non-functional and abrogates protein expression from that RNA. In this manner, synthesis of a protein associated with a disease state can be selectively inhibited (Warashina et al., 1999, Chemistry and Biology, 6, 237-250.

[0087] The nucleic acid molecules of the instant invention are also referred to as GeneBloc reagents, which are essentially nucleic acid molecules (eg; ribozymes, antisense) capable of down-regulating gene expression.

[0088] Target Sites

[0089] Targets for useful enzymatic nucleic acid molecules and antisense nucleic acids can be determined as disclosed in Draper et al., WO 93/23569; Sullivan et al., WO 93/23057; Thompson et al., WO 94/02595; Draper et al., WO 95/04818; McSwiggen et al., U.S. Pat. No. 5,525,468, and hereby incorporated by reference herein in totality. Other examples include the following PCT applications, which concern inactivation of expression of disease-related genes: WO 95/23225, WO 95/13380, WO 94/02595, incorporated by reference herein. Rather than repeat the guidance provided in those documents here, below are provided specific examples of such methods, not limiting to those in the art. Enzymatic nucleic acid molecules and antisense to such targets are designed as described in those applications and synthesized to be tested in vitro and in vivo, as also described. The sequences of human NOGO RNAs were screened for optimal enzymatic nucleic acid and antisense target sites using a computer-folding algorithm. Antisense, hammerhead, DNAzyme, NCH, amberzyme, zinzyme, or G-Cleaver enzymatic nucleic acid molecule binding/cleavage sites were identified. These sites are shown in Tables III to VII (all sequences are 5′ to 3′ in the tables; underlined regions can be any sequence “X” or linker X, the actual sequence is not relevant here). The nucleotide base position is noted in the Tables as that site to be cleaved by the designated type of enzymatic nucleic acid molecule. While human sequences can be screened and enzymatic nucleic acid molecule and/or antisense thereafter designed, as discussed in Stinchcomb et al., WO 95/23225, mouse targeted enzymatic nucleic acid molecules can be useful to test efficacy of action of the enzymatic nucleic acid molecule and/or antisense prior to testing in humans.

[0090] Antisense, hammerhead, DNAzyme, NCH, amberzyme, zinzyme or G-Cleaver enzymatic nucleic acid molecule binding/cleavage sites were identified. The nucleic acid molecules are individually analyzed by computer folding (Jaeger et al., 1989 Proc. Natl. Acad. Sci. USA, 86, 7706) to assess whether the sequences fold into the appropriate secondary structure. Those nucleic acid molecules with unfavorable intramolecular interactions such as between the binding arms and the catalytic core are eliminated from consideration. Varying binding arm lengths can be chosen to optimize activity.

[0091] Antisense, hammerhead, DNAzyme, NCH, amberzyme, zinzyme or G-Cleaver enzymatic nucleic acid molecule binding/cleavage sites were identified and were designed to anneal to various sites in the RNA target. The binding arms are complementary to the target site sequences described above. The nucleic acid molecules were chemically synthesized. The method of synthesis used follows the procedure for normal DNA/RNA synthesis as described below and in Usman et al., 1987 J. Am. Chem. Soc., 109, 7845; Scaringe et al., 1990 Nucleic Acids Res., 18, 5433; and Wincott et al., 1995 Nucleic Acids Res. 23, 2677-2684; Caruthers et al., 1992, Methods in Enzymology 211,3-19.

[0092] Synthesis of Nucleic Acid Molecules

[0093] Synthesis of nucleic acids greater than 100 nucleotides in length is difficult using automated methods, and the therapeutic cost of such molecules is prohibitive. In this invention, small nucleic acid motifs (“small refers to nucleic acid motifs less than about 100 nucleotides in length, preferably less than about 80 nucleotides in length, and more preferably less than about 50 nucleotides in length; e.g., antisense oligonucleotides, hammerhead or the NCH ribozymes) are preferably used for exogenous delivery. The simple structure of these molecules increases the ability of the nucleic acid to invade targeted regions of RNA structure. Exemplary molecules of the instant invention are chemically synthesized, and others can similarly be synthesized.

[0094] Oligonucleotides (eg; antisense GeneBlocs) are synthesized using protocols known in the art as described in Caruthers et al., 1992, Methods in Enzymology 211, 3-19, Thompson et al., International PCT Publication No. WO 99/54459, Wincott et al., 1995, Nucleic Acids Res. 23, 2677-2684, Wincott et al., 1997, Methods Mol. Bio., 74, 59, Brennan et al., 1998, Biotechnol Bioeng., 61, 33-45, and Brennan, U.S. Pat. No. 6,001,311. All of these references are incorporated herein by reference. The synthesis of oligonucleotides makes use of common nucleic acid protecting and coupling groups, such as dimethoxytrityl at the 5′-end, and phosphoramidites at the 3′-end. In a non-limiting example, small scale syntheses are conducted on a 394 Applied Biosystems, Inc. synthesizer using a 0.2 μmol scale protocol with a 2.5 min coupling step for 2′-O-methylated nucleotides and a 45 sec coupling step for 2′-deoxy nucleotides. Table II outlines the amounts and the contact times of the reagents used in the synthesis cycle. Alternatively, syntheses at the 0.2 μmol scale can be performed on a 96-well plate synthesizer, such as the instrument produced by Protogene (Palo Alto, Calif.) with minimal modification to the cycle. A 33-fold excess (60 μL of 0.11 M=6.6 μmol) of 2′-O-methyl phosphoramidite and a 105-fold excess of S-ethyl tetrazole (60 μL of 0.25 M=15 μmol) can be used in each coupling cycle of 2′-O-methyl residues relative to polymer-bound 5′-hydroxyl. A 22-fold excess (40 μL of 0.11 M=4.4 μmol) of deoxy phosphoramidite and a 70-fold excess of S-ethyl tetrazole (40 μL of 0.25 M=10 μmol) can be used in each coupling cycle of deoxy residues relative to polymer-bound 5′-hydroxyl. Average coupling yields on the 394 Applied Biosystems, Inc. synthesizer, determined by calorimetric quantitation of the trityl fractions, are typically 97.5-99%. Other oligonucleotide synthesis reagents for the 394 Applied Biosystems, Inc. synthesizer include; detritylation solution is 3% TCA in methylene chloride (ABI); capping is performed with 16% N-methylimidazole in THF (ABI) and 10% acetic anhydride/10% 2,6-lutidine in THF (ABI); and oxidation solution is 16.9 mM I₂, 49 mM pyridine, 9% water in THF (PERSEPTIVE™). Burdick & Jackson Synthesis Grade acetonitrile is used directly from the reagent bottle. S-Ethyltetrazole solution (0.25 M in acetonitrile) is made up from the solid obtained from American International Chemical., Inc. Alternately, for the introduction of phosphorothioate linkages, Beaucage reagent (3H-1,2-Benzodithiol-3-one 1,1-dioxide, 0.05 M in acetonitrile) is used.

[0095] Deprotection of the antisense oligonucleotides is performed as follows: the polymer-bound trityl-on oligoribonucleotide is transferred to a 4 mL glass screw top vial and suspended in a solution of 40% aq. methylamine (1 mL) at 65° C. for 10 min. After cooling to −20° C., the supernatant is removed from the polymer support. The support is washed three times with 1.0 mL of EtOH:MeCN:H₂O/3:1:1, vortexed and the supernatant is then added to the first supernatant. The combined supernatants, containing the oligoribonucleotide, are dried to a white powder.

[0096] The method of synthesis used for normal RNA including certain enzymatic nucleic acid molecules follows the procedure as described in Usman et al., 1987, J. Am. Chem. Soc., 109, 7845; Scaringe et al., 1990, Nucleic Acids Res., 18, 5433; and Wincott et al., 1995, Nucleic Acids Res. 23, 2677-2684 Wincott et al., 1997, Methods Mol. Bio., 74, 59, and makes use of common nucleic acid protecting and coupling groups, such as dimethoxytrityl at the 5′-end, and phosphoramidites at the 3′-end. In a non-limiting example, small scale syntheses are conducted on a 394 Applied Biosystems, Inc. synthesizer using a 0.2 μmol scale protocol with a 7.5 min coupling step for alkylsilyl protected nucleotides and a 2.5 min coupling step for 2′-O-methylated nucleotides. Table II outlines the amounts and the contact times of the reagents used in the synthesis cycle. Alternatively, syntheses at the 0.2 μmol scale can be done on a 96-well plate synthesizer, such as the instrument produced by Protogene (Palo Alto, Calif.) with minimal modification to the cycle. A 33-fold excess (60 μL of 0.11 M=6.6 μmol) of 2′-O-methyl phosphoramidite and a 75-fold excess of S-ethyl tetrazole (60 μL of 0.25 M=15 μmol) can be used in each coupling cycle of 2′-O-methyl residues relative to polymer-bound 5′-hydroxyl. A 66-fold excess (120 μL of 0.11 M=13.2 μmol) of alkylsilyl (ribo) protected phosphoramidite and a 150-fold excess of S-ethyl tetrazole (120 μL of 0.25 M=30 μmol) can be used in each coupling cycle of ribo residues relative to polymer-bound 5′-hydroxyl. Average coupling yields on the 394 Applied Biosystems, Inc. synthesizer, determined by colorimetric quantitation of the trityl fractions, are typically 97.5-99%. Other oligonucleotide synthesis reagents for the 394 Applied Biosystems, Inc. synthesizer include; detritylation solution is 3% TCA in methylene chloride (ABI); capping is performed with 16% N-methylimidazole in THF (ABI) and 10% acetic anhydride/10% 2,6-lutidine in THF (ABI); oxidation solution is 16.9 mM 12, 49 mM pyridine, 9% water in THF (PERSEPTIVE™). Burdick & Jackson Synthesis Grade acetonitrile is used directly from the reagent bottle. S-Ethyltetrazole solution (0.25 M in acetonitrile) is made up from the solid obtained from American International Chemical, Inc. Alternately, for the introduction of phosphorothioate linkages, Beaucage reagent (3H-1,2-Benzodithiol-3-one 1,1-dioxide 0.05 M in acetonitrile) is used.

[0097] Deprotection of the RNA is performed using either a two-pot or one-pot protocol. For the two-pot protocol, the polymer-bound trityl-on oligoribonucleotide is transferred to a 4 mL glass screw top vial and suspended in a solution of 40% aq. methylamine (1 mL) at 65° C. for 10 min. After cooling to −20° C., the supernatant is removed from the polymer support. The support is washed three times with 1.0 mL of EtOH:MeCN:H₂O/3:1:1, vortexed and the supernatant is then added to the first supernatant. The combined supernatants, containing the oligoribonucleotide, are dried to a white powder. The base deprotected oligoribonucleotide is resuspended in anhydrous TEA/HF/NMP solution (300 μL of a solution of 1.5 mL N-methylpyrrolidinone, 750 μL TEA and 1 mL TEA•3HF to provide a 1.4 M HF concentration) and heated to 65° C. After 1.5 h, the oligomer is quenched with 1.5 M NH₄HCO₃.

[0098] Alternatively, for the one-pot protocol, the polymer-bound trityl-on oligoribonucleotide is transferred to a 4 mL glass screw top vial and suspended in a solution of 33% ethanolic methylamine/DMSO: 1/1 (0.8 mL) at 65° C. for 15 min. The vial is brought to r.t. TEA-3HF (0.1 mL) is added and the vial is heated at 65° C. for 15 min. The sample is cooled at −20° C. and then quenched with 1.5 M NH₄HCO₃.

[0099] For purification of the trityl-on oligomers, the quenched NH₄HCO₃ solution is loaded onto a C-18 containing cartridge that had been prewashed with acetonitrile followed by 50 mM TEAA. After washing the loaded cartridge with water, the RNA is detritylated with 0.5% TFA for 13 min. The cartridge is then washed again with water, salt exchanged with 1 M NaCl and washed with water again. The oligonucleotide is then eluted with 30% acetonitrile.

[0100] Inactive hammerhead ribozymes or binding attenuated control (BAC) oligonucleotides) are synthesized by substituting a U for G₅ and a U for A₁₄ (numbering from Hertel, K. J., et al., 1992, Nucleic Acids Res., 20, 3252). Similarly, one or more nucleotide substitutions can be introduced in other enzymatic nucleic acid molecules to inactivate the molecule and such molecules can serve as a negative control.

[0101] The average stepwise coupling yields are typically >98% (Wincott et al., 1995 Nucleic Acids Res. 23, 2677-2684). Those of ordinary skill in the art will recognize that the scale of synthesis can be adapted to be larger or smaller than the example described above including but not limited to 96 well format, all that is important is the ratio of chemicals used in the reaction.

[0102] Alternatively, the nucleic acid molecules of the present invention can be synthesized separately and joined together post-synthetically, for example by ligation (Moore et al., 1992, Science 256, 9923; Draper et al., International PCT publication No. WO 93/23569; Shabarova et al., 1991, Nucleic Acids Research 19, 4247; Bellon et al., 1997, Nucleosides & Nucleotides, 16, 951; Bellon et al., 1997, Bioconjugate Chem. 8, 204).

[0103] The nucleic acid molecules of the present invention are modified extensively to enhance stability by modification with nuclease resistant groups, for example, 2′-amino, 2′-C-allyl, 2′-flouro, 2′-O-methyl, 2′-H (for a review see Usman and Cedergren, 1992, TIBS 17, 34; Usman et al., 1994, Nucleic Acids Symp. Ser. 31, 163). Ribozymes are purified by gel electrophoresis using general methods or are purified by high pressure liquid chromatography (HPLC; See Wincott et al., Supra, the totality of which is hereby incorporated herein by reference) and are re-suspended in water.

[0104] The sequences of the ribozymes that are chemically synthesized, are shown in Tables III to VII. The sequences of the antisense constructs that are chemically synthesized, are complementary to the Substrate sequences shown in Tables III to VII. Those in the art will recognize that these sequences are representative only of many more such sequences where the enzymatic portion of the ribozyme (all but the binding arms) is altered to affect activity. The ribozyme and antisense construct sequences listed in Tables III to VII can be formed of ribonucleotides or other nucleotides or non-nucleotides. Such ribozymes with enzymatic activity are equivalent to the ribozymes described specifically in the Tables.

[0105] Optimizing Activity of the Nucleic Acid Molecule of the Invention.

[0106] Chemically synthesizing nucleic acid molecules with modifications (base, sugar and/or phosphate) that prevent their degradation by serum ribonucleases can increase their potency (see e.g., Eckstein et al., International Publication No. WO 92/07065; Perrault et al., 1990 Nature 344, 565; Pieken et al., 1991, Science 253, 314; Usman and Cedergren, 1992, Trends in Biochem. Sci. 17, 334; Usman et al., International Publication No. WO 93/15187; and Rossi et al., International Publication No. WO 91/03162; Sproat, U.S. Pat. No. 5,334,711; and Burgin et al., supra; all of these describe various chemical modifications that can be made to the base, phosphate and/or sugar moieties of the nucleic acid molecules herein). Modifications which enhance their efficacy in cells, and removal of bases from nucleic acid molecules to shorten oligonucleotide synthesis times and reduce chemical requirements are desired. (All these publications are hereby incorporated by reference herein).

[0107] There are several examples in the art describing sugar, base and phosphate modifications that can be introduced into nucleic acid molecules with significant enhancement in their nuclease stability and efficacy. For example, oligonucleotides are modified to enhance stability and/or enhance biological activity by modification with nuclease resistant groups, for example, 2′-amino, 2′-C-allyl, 2′-flouro, 2′-O-methyl, 2′-H, nucleotide base modifications (for a review see Usman and Cedergren, 1992, TIBS. 17, 34; Usman et al., 1994, Nucleic Acids Symp. Ser. 31, 163; Burgin et al., 1996, Biochemistry, 35, 14090). Sugar modification of nucleic acid molecules have been extensively described in the art (see Eckstein et al., International Publication PCT No. WO 92/07065; Perrault et al. Nature, 1990, 344, 565-568; Pieken et al. Science, 1991, 253, 314-317; Usman and Cedergren, Trends in Biochem. Sci., 1992, 17, 334-339; Usman et al. International Publication PCT No. WO 93/15187; Sproat, U.S. Pat. No. 5,334,711 and Beigelman et al., 1995, J. Biol. Chem., 270, 25702; Beigelman et al., International PCT publication No. WO 97/26270; Beigelman et al., U.S. Pat. No. 5,716,824; Usman et al., U.S. Pat. No. 5,627,053; Woolf et al., International PCT Publication No. WO 98/13526; Thompson et al., U.S. S No. 60/082,404 which was filed on Apr. 20, 1998; Karpeisky et al., 1998, Tetrahedron Lett., 39, 1131; Earnshaw and Gait, 1998, Biopolymers (Nucleic acid Sciences), 48, 39-55; Verma and Eckstein, 1998, Annu. Rev. Biochem., 67, 99-134; and Burlina et al., 1997, Bioorg. Med. Chem., 5, 1999-2010; all of the references are hereby incorporated in their totality by reference herein). Such publications describe general methods and strategies to determine the location of incorporation of sugar, base and/or phosphate modifications and the like into ribozymes without inhibiting catalysis, and are incorporated by reference herein. In view of such teachings, similar modifications can be used as described herein to modify the nucleic acid molecules of the instant invention.

[0108] While chemical modification of oligonucleotide internucleotide linkages with phosphorothioate, phosphorothioate, and/or 5′-methylphosphonate linkages improves stability, too many of these modifications can cause some toxicity. Therefore when designing nucleic acid molecules the amount of these internucleotide linkages should be minimized. The reduction in the concentration of these linkages should lower toxicity resulting in increased efficacy and higher specificity of these molecules.

[0109] Nucleic acid molecules having chemical modifications which maintain or enhance activity are provided. Such nucleic acid is also generally more resistant to nucleases than unmodified nucleic acid. Thus, in a cell and/or in vivo the activity may not be significantly lowered. Therapeutic nucleic acid molecules delivered exogenously are optimally stable within cells until translation of the target RNA has been inhibited long enough to reduce the levels of the undesirable protein. This period of time varies between hours to days depending upon the disease state. Clearly, nucleic acid molecules must be resistant to nucleases in order to function as effective intracellular therapeutic agents. Improvements in the chemical synthesis of RNA and DNA (Wincott et al., 1995 Nucleic Acids Res. 23, 2677; Caruthers et al., 1992, Methods in Enzymology 211,3-19 (incorporated by reference herein) have expanded the ability to modify nucleic acid molecules by introducing nucleotide modifications to enhance their nuclease stability as described above.

[0110] Use of the nucleic acid-based molecules of the invention can lead to better treatment of the disease progression by affording the possibility of combination therapies (e.g., multiple antisense or enzymatic nucleic acid molecules targeted to different genes, nucleic acid molecules coupled with known small molecule inhibitors, or intermittent treatment with combinations of molecules (including different motifs) and/or other chemical or biological molecules). The treatment of patients with nucleic acid molecules can also include combinations of different types of nucleic acid molecules.

[0111] Therapeutic nucleic acid molecules (e.g., enzymatic nucleic acid molecules and antisense nucleic acid molecules) delivered exogenously are optimally stable within cells until translation of the target RNA has been inhibited long enough to reduce the levels of the undesirable protein. This period of time varies between hours to days depending upon the disease state. These nucleic acid molecules should be resistant to nucleases in order to function as effective intracellular therapeutic agents. Improvements in the chemical synthesis of nucleic acid molecules described in the instant invention and in the art have expanded the ability to modify nucleic acid molecules by introducing nucleotide modifications to enhance their nuclease stability as described above.

[0112] In another embodiment, nucleic acid catalysts having chemical modifications which maintain or enhance enzymatic activity are provided. Such nucleic acids are also generally more resistant to nucleases than unmodified nucleic acid. Thus, in a cell and/or in vivo the activity of the nucleic acid may not be significantly lowered. As exemplified herein such enzymatic nucleic acids are useful in a cell and/or in vivo even if activity over all is reduced 10 fold (Burgin et al., 1996, Biochemistry, 35, 14090). Such enzymatic nucleic acids herein are said to “maintain” the enzymatic activity of an all RNA ribozyme or all DNA DNAzyme.

[0113] In another aspect the nucleic acid molecules comprise a 5′ and/or a 3′-cap structure.

[0114] By “cap structure” is meant chemical modifications, which have been incorporated at either terminus of the oligonucleotide (see for example Wincott et al., WO 97/26270, incorporated by reference herein). These terminal modifications protect the nucleic acid molecule from exonuclease degradation, and can help in delivery and/or localization within a cell. The cap can be present at the 5′-terminus (5′-cap) or at the 3′-terminus (3′-cap) or can be present on both terminus. In non-limiting examples, the 5′-cap includes inverted abasic residue (moiety), 4′,5′-methylene nucleotide; 1-(beta-D-erythrofuranosyl) nucleotide, 4′-thio nucleotide, carbocyclic nucleotide; 1,5-anhydrohexitol nucleotide; L-nucleotides; alpha-nucleotides; modified base nucleotide; phosphorodithioate linkage; threo-pentofuranosyl nucleotide; acyclic 3′,4′-seco nucleotide; acyclic 3,4-dihydroxybutyl nucleotide; acyclic 3,5-dihydroxypentyl nucleotide, 3′-3′-inverted nucleotide moiety; 3′-3′-inverted abasic moiety; 3′-2′-inverted nucleotide moiety; 3′-2′-inverted abasic moiety; 1,4-butanediol phosphate; 3′-phosphoramidate; hexylphosphate, aminohexyl phosphate; 3′-phosphate; 3′-phosphorothioate; phosphorodithioate; or bridging or non-bridging methylphosphonate moiety (for more details see Wincott et al., International PCT publication No. WO 97/26270, incorporated by reference herein).

[0115] In another embodiment the 3′-cap includes, for example 4′,5′-methylene nucleotide; 1-(beta-D-erythrofuranosyl) nucleotide; 4′-thio nucleotide, carbocyclic nucleotide; 5′-amino-alkyl phosphate; 1,3-diamino-2-propyl phosphate, 3-aminopropyl phosphate; 6-aminohexyl phosphate; 1,2-aminododecyl phosphate; hydroxypropyl phosphate; 1,5-anhydrohexitol nucleotide; L-nucleotide; alpha-nucleotide; modified base nucleotide; phosphorodithioate; threo-pentofuranosyl nucleotide; acyclic 3′,4′-seco nucleotide; 3,4-dihydroxybutyl nucleotide; 3,5-dihydroxypentyl nucleotide, 5′-5′-inverted nucleotide moiety; 5′-5′-inverted abasic moiety; 5′-phosphoramidate; 5′-phosphorothioate; 1,4-butanediol phosphate; 5′-amino; bridging and/or non-bridging 5′-phosphoramidate, phosphorothioate and/or phosphorodithioate, bridging or non bridging methylphosphonate and 5′-mercapto moieties (for more details see Beaucage and Iyer, 1993, Tetrahedron 49, 1925; incorporated by reference herein).

[0116] By the term “non-nucleotide” is meant any group or compound which can be incorporated into a nucleic acid chain in the place of one or more nucleotide units, including either sugar and/or phosphate substitutions, and allows the remaining bases to exhibit their enzymatic activity. The group or compound is abasic in that it does not contain a commonly recognized nucleotide base, such as adenosine, guanine, cytosine, uracil or thymine.

[0117] An “alkyl” group refers to a saturated aliphatic hydrocarbon, including straight-chain, branched-chain, and cyclic alkyl groups. Preferably, the alkyl group has 1 to 12 carbons. More preferably it is a lower alkyl of from 1 to 7 carbons, more preferably 1 to 4 carbons. The alkyl group can be substituted or unsubstituted. When substituted the substituted group(s) is preferably, hydroxyl, cyano, alkoxy, ═O, ═S, NO2 or N(CH3)2, amino, or SH. The term also includes alkenyl groups which are unsaturated hydrocarbon groups containing at least one carbon-carbon double bond, including straight-chain, branched-chain, and cyclic groups. Preferably, the alkenyl group has 1 to 12 carbons. More preferably it is a lower alkenyl of from 1 to 7 carbons, more preferably 1 to 4 carbons. The alkenyl group can be substituted or unsubstituted. When substituted the substituted group(s) is preferably, hydroxyl, cyano, alkoxy, ═O, ═S, NO2, halogen, N(CH3)2, amino, or SH. The term “alkyl” also includes alkynyl groups which have an unsaturated hydrocarbon group containing at least one carbon-carbon triple bond, including straight-chain, branched-chain, and cyclic groups. Preferably, the alkynyl group has 1 to 12 carbons. More preferably it is a lower alkynyl of from 1 to 7 carbons, more preferably 1 to 4 carbons. The alkynyl group can be substituted or unsubstituted. When substituted the substituted group(s) is preferably, hydroxyl, cyano, alkoxy, ═O, ═S, NO2 or N(CH3)2, amino or SH.

[0118] Such alkyl groups can also include aryl, alkylaryl, carbocyclic aryl, heterocyclic aryl, amide and ester groups. An “aryl” group refers to an aromatic group which has at least one ring having a conjugated p electron system and includes carbocyclic aryl, heterocyclic aryl and biaryl groups, all of which can be optionally substituted. The preferred substituent(s) of aryl groups are halogen, trihalomethyl, hydroxyl, SH, OH, cyano, alkoxy, alkyl, alkenyl, alkynyl, and amino groups. An “alkylaryl” group refers to an alkyl group (as described above) covalently joined to an aryl group (as described above). Carbocyclic aryl groups are groups wherein the ring atoms on the aromatic ring are all carbon atoms. The carbon atoms are optionally substituted. Heterocyclic aryl groups are groups having from 1 to 3 heteroatoms as ring atoms in the aromatic ring and the remainder of the ring atoms are carbon atoms. Suitable heteroatoms include oxygen, sulfur, and nitrogen, and include furanyl, thienyl, pyridyl, pyrrolyl, N-lower alkyl pyrrolo, pyrimidyl, pyrazinyl, imidazolyl and the like, all optionally substituted. An “amide” refers to an —C(O)—NH—R, where R is either alkyl, aryl, alkylaryl or hydrogen. An “ester” refers to an —C(O)—OR′, where R is either alkyl, aryl, alkylaryl or hydrogen.

[0119] By “nucleotide” is meant a heterocyclic nitrogenous base in N-glycosidic linkage with a phosphorylated sugar. Nucleotides are recognized in the art to include natural bases (standard), and modified bases well known in the art. Such bases are generally located at the 1′ position of a nucleotide sugar moiety. Nucleotides generally comprise a base, sugar and a phosphate group. The nucleotides can be unmodified or modified at the sugar, phosphate and/or base moiety, (also referred to interchangeably as nucleotide analogs, modified nucleotides, non-natural nucleotides, non-standard nucleotides and other; see for example, Usman and McSwiggen, supra; Eckstein et al., International PCT Publication No. WO 92/07065; Usman et al., International PCT Publication No. WO 93/15187; Uhlman & Peyman, supra all are hereby incorporated by reference herein). There are several examples of modified nucleic acid bases known in the art as summarized by Limbach et al., 1994, Nucleic Acids Res. 22, 2183. Some of the non-limiting examples of chemically modified and other natural nucleic acid bases that can be introduced into nucleic acids include, for example, inosine, purine, pyridin-4-one, pyridin-2-one, phenyl, pseudouracil, 2, 4, 6-trimethoxy benzene, 3-methyl uracil, dihydrouridine, naphthyl, aminophenyl, 5-alkylcytidines (e.g., 5-methylcytidine), 5-alkyluridines (e.g., ribothymidine), 5-halouridine (e.g., 5-bromouridine) or 6-azapyrimidines or 6-alkylpyrimidines (e.g. 6-methyluridine), propyne, quesosine, 2-thiouridine, 4-thiouridine, wybutosine, wybutoxosine, 4-acetylcytidine, 5-(carboxyhydroxymethyl)uridine, 5′-carboxymethylaminomethyl-2-thiouridine, 5-carboxymethylaminomethyluridine, beta-D-galactosylqueosine, 1-methyladenosine, 1-methylinosine, 2,2-dimethylguanosine, 3-methylcytidine, 2-methyladenosine, 2-methylguanosine, N6-methyladenosine, 7-methylguanosine, 5-methoxyaminomethyl-2-thiouridine, 5-methylaminomethyluridine, 5-methylcarbonylmethyluridine, 5-methyloxyuridine, 5-methyl-2-thiouridine, 2-methylthio-N-6-isopentenyladenosine, beta-D-mannosylqueosine, uridine-5-oxyacetic acid, 2-thiocytidine, threonine derivatives and others (Burgin et al., 1996, Biochemistry, 35, 14090; Uhlman & Peyman, supra). By “modified bases” in this aspect is meant nucleotide bases other than adenine, guanine, cytosine and uracil at 1′ position or their equivalents; such bases can be used at any position, for example, within the catalytic core of an enzymatic nucleic acid molecule and/or in the substrate-binding regions of the nucleic acid molecule.

[0120] By “nucleoside” is meant a heterocyclic nitrogenous base in N-glycosidic linkage with a sugar. Nucleosides are recognized in the art to include natural bases (standard), and modified bases well known in the art. Such bases are generally located at the 1′ position of a nucleoside sugar moiety. Nucleosides generally comprise a base and sugar group. The nucleosides can be unmodified or modified at the sugar, and/or base moiety, (also referred to interchangeably as nucleoside analogs, modified nucleosides, non-natural nucleosides, non-standard nucleosides and other; see for example, Usman and McSwiggen, supra; Eckstein et al., International PCT Publication No. WO 92/07065; Usman et al., International PCT Publication No. WO 93/15187; Uhlman & Peyman, supra all are hereby incorporated by reference herein). There are several examples of modified nucleic acid bases known in the art as summarized by Limbach et al., 1994, Nucleic Acids Res. 22, 2183. Some of the non-limiting examples of chemically modified and other natural nucleic acid bases that can be introduced into nucleic acids include, inosine, purine, pyridin-4-one, pyridin-2-one, phenyl, pseudouracil, 2, 4, 6-trimethoxy benzene, 3-methyl uracil, dihydrouridine, naphthyl, aminophenyl, 5-alkylcytidines (e.g., 5-methylcytidine), 5-alkyluridines (e.g., ribothymidine), 5-halouridine (e.g., 5-bromouridine) or 6-azapyrimidines or 6-alkylpyrimidines (e.g. 6-methyluridine), propyne, quesosine, 2-thiouridine, 4-thiouridine, wybutosine, wybutoxosine, 4-acetylcytidine, 5-(carboxyhydroxymethyl)uridine, 5′-carboxymethylaminomethyl-2-thiouridine, 5-carboxymethylaminomethyluridine, β-D-galactosylqueosine, 1-methyladenosine, 1-methylinosine, 2,2-dimethylguanosine, 3-methylcytidine, 2-methyladenosine, 2-methylguanosine, N6-methyladenosine, 7-methylguanosine, 5-methoxyaminomethyl-2-thiouridine, 5-methylaminomethyluridine, 5-methylcarbonylmethyluridine, 5-methyloxyuridine, 5-methyl-2-thiouridine, 2-methylthio-N-6-isopentenyladenosine, beta-D-mannosylqueosine, uridine-5-oxyacetic acid, 2-thiocytidine, threonine derivatives and others (Burgin et al., 1996, Biochemistry, 35, 14090; Uhlman & Peyman, supra). By “modified bases” in this aspect is meant nucleoside bases other than adenine, guanine, cytosine and uracil at 1′ position or their equivalents; such bases can be used at any position, for example, within the catalytic core of an enzymatic nucleic acid molecule and/or in the substrate-binding regions of the nucleic acid molecule.

[0121] In one embodiment, the invention features modified enzymatic nucleic acid molecules with phosphate backbone modifications comprising one or more phosphorothioate, phosphorodithioate, methylphosphonate, morpholino, amidate carbamate, carboxymethyl, acetamidate, polyamide, sulfonate, sulfonamide, sulfamate, formacetal, thioformacetal, and/or alkylsilyl, substitutions. For a review of oligonucleotide backbone modifications see Hunziker and Leumann, 1995, Nucleic Acid Analogues: Synthesis and Properties, in Modern Synthetic Methods, VCH, 331-417, and Mesmaeker et al., 1994, Novel Backbone Replacements for Oligonucleotides, in Carbohydrate Modifications in Antisense Research, ACS, 24-39. These references are hereby incorporated by reference herein.

[0122] By “abasic” is meant sugar moieties lacking a base or having other chemical groups in place of a base at the 1′ position, (for more details see Wincott et al., International PCT publication No. WO 97/26270).

[0123] By “unmodified nucleoside” is meant one of the bases adenine, cytosine, guanine, thymine, uracil joined to the 1′ carbon of β-D-ribo-furanose.

[0124] By “modified nucleoside” is meant any nucleotide base which contains a modification in the chemical structure of an unmodified nucleotide base, sugar and/or phosphate.

[0125] In connection with 2′-modified nucleotides as described for the present invention, by “amino” is meant 2′-NH₂ or 2′-O—NH₂, which can be modified or unmodified. Such modified groups are described, for example, in Eckstein et al., U.S. Pat. No. 5,672,695 and Matulic-Adamic et al., WO 98/28317, respectively, which are both incorporated by reference in their entireties.

[0126] Various modifications to nucleic acid (e.g., antisense and ribozyme) structure can be made to enhance the utility of these molecules. For example, such modifications can enhance shelf-life, half-life in vitro, stability, and ease of introduction of such oligonucleotides to the target site, including e.g., enhancing penetration of cellular membranes and confering the ability to recognize and bind to targeted cells.

[0127] Use of these molecules can lead to better treatment of the disease progression by affording the possibility of combination therapies (e.g., multiple enzymatic nucleic acid molecules targeted to different genes, enzymatic nucleic acid molecules coupled with known small molecule inhibitors, or intermittent treatment with combinations of enzymatic nucleic acid molecules (including different enzymatic nucleic acid molecule motifs) and/or other chemical or biological molecules). The treatment of patients with nucleic acid molecules can also include combinations of different types of nucleic acid molecules. Therapies can be devised which include a mixture of enzymatic nucleic acid molecules (including different enzymatic nucleic acid molecule motifs), antisense and/or 2-5A chimera molecules to one or more targets to alleviate symptoms of a disease.

[0128] Administration of Nucleic Acid Molecules

[0129] Methods for the delivery of nucleic acid molecules are described in Akhtar et al., 1992, Trends Cell Bio., 2, 139; and Delivery Strategies for Antisense Oligonucleotide Therapeutics, ed. Akhtar, 1995 which are both incorporated herein by reference. Sullivan et al., PCT WO 94/02595, further describes the general methods for delivery of enzymatic RNA molecules. These protocols can be utilized for the delivery of virtually any nucleic acid molecule. Nucleic acid molecules can be administered to cells by a variety of methods known to those familiar to the art, including, but not restricted to, encapsulation in liposomes, by iontophoresis, or by incorporation into other vehicles, such as hydrogels, cyclodextrins, biodegradable nanocapsules, and bioadhesive microspheres. Alternatively, the nucleic acid/vehicle combination is locally delivered by direct injection or by use of an infusion pump. Many examples in the art describe CNS delivery methods of oligonucleotides by osmotic pump, (see Chun et al., 1998, Neuroscience Letters, 257, 135-138, D'Aldin et al., 1998, Mol. Brain Research, 55, 151-164, Dryden et al., 1998, J. Endocrinol., 157, 169-175, Ghirnikar et al., 1998, Neuroscience Letters, 247, 21-24) or direct infusion (Broaddus et al., 1997, Neurosurg. Focus, 3, article 4). Other routes of delivery include, but are not limited to oral (tablet or pill form) and/or intrathecal delivery (Gold, 1997, Neuroscience, 76, 1153-1158). For a comprehensive review on drug delivery strategies including broad coverage of CNS delivery, see Ho et al., 1999, Curr. Opin. Mol. Ther., 1, 336-343 and Jain, Drug Delivery Systems: Technologies and Commercial Opportunities, Decision Resources, 1998 and Groothuis et al., 1997, J. NeuroVirol., 3, 387-400. More detailed descriptions of nucleic acid delivery and administration are provided in Sullivan et al., supra, Draper et al., PCT WO93/23569, Beigelman et al., PCT WO99/05094, and Klimuk et al., PCT WO99/04819 all of which have been incorporated by reference herein.

[0130] Experiments have demonstrated the efficient in vivo uptake of nucleic acids by neurons. As an example of local administration of nucleic acids to nerve cells, Sommer et al., 1998, Antisense Nuc. Acid Drug Dev., 8, 75, describe a study in which a 15mer phosphorothioate antisense nucleic acid molecule to c-fos is administered to rats via microinjection into the brain. Antisense molecules labeled with tetramethylrhodamine-isothiocyanate (TRITC) or fluorescein isothiocyanate (FITC) were taken up by exclusively by neurons thirty minutes post-injection. A diffuse cytoplasmic staining and nuclear staining was observed in these cells. As an example of systemic administration of nucleic acid to nerve cells, Epa et al., 2000, Antisense Nuc. Acid Drug Dev., 10, 469, describe an in vivo mouse study in which beta-cyclodextrin-adamantane-oligonucleotide conjugates were used to target the p75 neurotrophin receptor in neuronally differentiated PC12 cells. Following a two week course of IP administration, pronounced uptake of p75 neurotrophin receptor antisense was observed in dorsal root ganglion (DRG) cells. In addition, a marked and consistent down-regulation of p75 was observed in DRG neurons. Additional approaches to the targeting of nucleic acid to neurons are described in Broaddus et al., 1998, J. Neurosurg., 88(4), 734; Karle et al., 1997, Eur. J. Pharmocol., 340(2/3), 153; Bannai et al., 1998, Brain Research, 784(1,2), 304; Rajakumar et al., 1997, Synapse, 26(3), 199; Wu-pong et al., 1999, BioPharm, 12(1), 32; Bannai et al., 1998, Brain Res. Protoc., 3(1), 83; Simantov et al., 1996, Neuroscience, 74(1), 39. Nucleic acid molecules of the invention are therefore amenable to delivery to and uptake by cells that express NOGO and NOGO receptors for modulation of NOGO and/or NOGO receptor expression.

[0131] The delivery of nucleic acid molecules of the invention, targeting NOGO and NOGO receptors is provided by a variety of different strategies. Traditional approaches to CNS delivery that can be used include, but are not limited to, intrathecal and intracerebroventricular administration, implantation of catheters and pumps, direct injection or perfusion at the site of injury or lesion, injection into the brain arterial system, or by chemical or osmotic opening of the blood-brain barrier. Other approaches can include the use of various transport and carrier systems, for example though the use of conjugates and biodegradable polymers. Furthermore, gene therapy approaches, for example as described in Kaplitt et al., U.S. Pat. No. 6,180,613, can be used to express nucleic acid molecules in the CNS.

[0132] The molecules of the instant invention can be used as pharmaceutical agents. Pharmaceutical agents prevent, inhibit the occurrence, or treat (alleviate a symptom to some extent, preferably all of the symptoms) of a disease state in a patient.

[0133] The negatively charged polynucleotides of the invention can be administered (e.g., RNA, DNA or protein) and introduced into a patient by any standard means, with or without stabilizers, buffers, and the like, to form a pharmaceutical composition. When it is desired to use a liposome delivery mechanism, standard protocols for formation of liposomes can be followed. The compositions of the present invention can also be formulated and used as tablets, capsules or elixirs for oral administration; suppositories for rectal administration; sterile solutions; suspensions for injectable administration; and the other compositions known in the art.

[0134] The present invention also includes pharmaceutically acceptable formulations of the compounds described. These formulations include salts of the above compounds, e.g., acid addition salts, for example, salts of hydrochloric, hydrobromic, acetic acid, and benzene sulfonic acid.

[0135] A pharmacological composition or formulation refers to a composition or formulation in a form suitable for administration, e.g., systemic administration, into a cell or patient, preferably a human. Suitable forms, in part, depend upon the use or the route of entry, for example oral, transdermal, or by injection. Such forms should not prevent the composition or formulation from reaching a target cell (i.e., a cell to which the negatively charged polymer is desired to be delivered to). For example, pharmacological compositions injected into the blood stream should be soluble. Other factors are known in the art, and include considerations such as toxicity and forms which prevent the composition or formulation from exerting its effect.

[0136] By “systemic administration” is meant in vivo systemic absorption or accumulation of drugs in the blood stream followed by distribution throughout the entire body. Administration routes which lead to systemic absorption include, without limitations: intravenous, subcutaneous, intraperitoneal, inhalation, oral, intrapulmonary and intramuscular. Each of these administration routes expose the desired negatively charged polymers, e.g., nucleic acids, to an accessible diseased tissue. The rate of entry of a drug into the circulation has been shown to be a function of molecular weight or size. The use of a liposome or other drug carrier comprising the compounds of the instant invention can potentially localize the drug, for example, in certain tissue types, such as the tissues of the reticular endothelial system (RES). A liposome formulation which can facilitate the association of drug with the surface of cells, such as, lymphocytes and macrophages is also useful. This approach can provide enhanced delivery of the drug to target cells by taking advantage of the specificity of macrophage and lymphocyte immune recognition of abnormal cells, such as cancer cells.

[0137] By pharmaceutically acceptable formulation is meant, a composition or formulation that allows for the effective distribution of the nucleic acid molecules of the instant invention in the physical location most suitable for their desired activity. Non-limiting examples of agents suitable for formulation with the nucleic acid molecules of the instant invention include: P-glycoprotein inhibitors (such as Pluronic P85) which can enhance entry of drugs into the CNS (Jolliet-Riant and Tillement, 1999, Fundam. Clin. Pharmacol., 13, 16-26); biodegradable polymers, such as poly (DL-lactide-coglycolide) microspheres for sustained release delivery after intracerebral implantation (Emerich, D F et al, 1999, Cell Transplant, 8, 47-58) Alkermes, Inc. Cambridge, Mass.; and loaded nanoparticles, such as those made of polybutylcyanoacrylate, which can deliver drugs across the blood brain barrier and can alter neuronal uptake mechanisms (Prog Neuropsychopharmacol Biol Psychiatry, 23, 941-949, 1999). Other non-limiting examples of delivery strategies, including CNS delivery of the nucleic acid molecules of the instant invention include material described in Boado et al., 1998, J. Pharm. Sci., 87, 1308-1315; Tyler et al., 1999, FEBS Lett., 421, 280-284; Pardridge et al., 1995, PNAS USA., 92, 5592-5596; Boado, 1995, Adv. Drug Delivery Rev., 15, 73-107; Aldrian-Herrada et al., 1998, Nucleic Acids Res., 26, 4910-4916; and Tyler et al., 1999, PNAS USA., 96, 7053-7058. All these references are hereby incorporated herein by reference.

[0138] The invention also features the use of the composition comprising surface-modified liposomes containing poly (ethylene glycol) lipids (PEG-modified, or long-circulating liposomes or stealth liposomes). These formulations offer a method for increasing the accumulation of drugs in target tissues. This class of drug carriers resists opsonization and elimination by the mononuclear phagocytic system (MPS or RES), thereby enabling longer blood circulation times and enhanced tissue exposure for the encapsulated drug (Lasic et al. Chem. Rev. 1995, 95, 2601-2627; Ishiwata et al., Chem. Pharm. Bull. 1995, 43, 1005-1011). Such liposomes have been shown to accumulate selectively in tumors, presumably by extravasation and capture in the neovascularized target tissues (Lasic et al., Science 1995, 267, 1275-1276; Oku et al., 1995, Biochim. Biophys. Acta, 1238, 86-90). The long-circulating liposomes enhance the pharmacokinetics and pharmacodynamics of DNA and RNA, particularly compared to conventional cationic liposomes which are known to accumulate in tissues of the MPS (Liu et al., J. Biol. Chem. 1995, 42, 24864-24870; Choi et al., International PCT Publication No. WO 96/10391; Ansell et al., International PCT Publication No. WO 96/10390; Holland et al., International PCT Publication No. WO 96/10392; all of which are incorporated by reference herein). Long-circulating liposomes are also likely to protect drugs from nuclease degradation to a greater extent compared to cationic liposomes, based on their ability to avoid accumulation in metabolically aggressive MPS tissues such as the liver and spleen. All of these references are incorporated by reference herein.

[0139] The present invention also includes compositions prepared for storage or administration which include a pharmaceutically effective amount of the desired compounds in a pharmaceutically acceptable carrier or diluent. Acceptable carriers or diluents for therapeutic use are well known in the pharmaceutical art, and are described, for example, in Remington's Pharmaceutical Sciences, Mack Publishing Co. (A. R. Gennaro edit. 1985) hereby incorporated by reference herein. For example, preservatives, stabilizers, dyes and flavoring agents can be provided. These include sodium benzoate, sorbic acid and esters of p-hydroxybenzoic acid. In addition, antioxidants and suspending agents can be used.

[0140] A pharmaceutically effective dose is that dose required to prevent, inhibit the occurrence, or treat (alleviate a symptom to some extent, preferably all of the symptoms) of a disease state. The pharmaceutically effective dose depends on the type of disease, the composition used, the route of administration, the type of mammal being treated, the physical characteristics of the specific mammal under consideration, concurrent medication, and other factors which those skilled in the medical arts will recognize. Generally, an amount between 0.1 mg/kg and 100 mg/kg body weight/day of active ingredients is administered dependent upon potency of the negatively charged polymer.

[0141] The nucleic acid molecules of the present invention can also be administered to a patient in combination with other therapeutic compounds to increase the overall therapeutic effect. The use of multiple compounds to treat an indication can increase the beneficial effects while reducing the presence of side effects.

[0142] Alternatively, certain of the nucleic acid molecules of the instant invention can be expressed within cells from eukaryotic promoters (e.g., Izant and Weintraub, 1985, Science, 229, 345; McGarry and Lindquist, 1986, Proc. Natl. Acad. Sci., USA 83, 399; Scanlon et al., 1991, Proc. Natl. Acad. Sci. USA, 88, 10591-5; Kashani-Sabet et al., 1992, Antisense Res. Dev., 2, 3-15; Dropulic et al., 1992, J. Virol., 66, 1432-41; Weerasinghe et al., 1991, J. Virol., 65, 5531-4; Ojwang et al., 1992, Proc. Natl. Acad. Sci. USA, 89, 10802-6; Chen et al., 1992, Nucleic Acids Res., 20, 4581-9; Sarver et al., 1990 Science, 247, 1222-1225; Thompson et al., 1995, Nucleic Acids Res., 23, 2259; Good et al., 1997, Gene Therapy, 4, 45; all of these references are hereby incorporated in their totalities by reference herein). Those skilled in the art realize that any nucleic acid can be expressed in eukaryotic cells from the appropriate DNA/RNA vector. The activity of such nucleic acids can be augmented by their release from the primary transcript by a enzymatic nucleic acid (Draper et al., PCT WO 93/23569, and Sullivan et al., PCT WO 94/02595; Ohkawa et al., 1992, Nucleic Acids Symp. Ser., 27, 15-6; Taira et al., 1991, Nucleic Acids Res., 19, 5125-30; Ventura et al., 1993, Nucleic Acids Res., 21, 3249-55; Chowrira et al., 1994, J. Biol. Chem., 269, 25856; all of these references are hereby incorporated in their totalities by reference herein). Gene therapy approaches specific to the CNS are described by Blesch et al., 2000, Drug News Perspect., 13, 269-280; Peterson et al., 2000, Cent. Nerv. Syst. Dis., 485-508; Peel and Klein, 2000, J. Neurosci. Methods, 98, 95-104; Hagihara et al., 2000, Gene Ther., 7, 759-763; and Herrlinger et al., 2000, Methods Mol. Med., 35, 287-312. AAV-mediated delivery of nucleic acid to cells of the nervous system is further described by Kaplitt et al., U.S. Pat. No. 6,180,613.

[0143] In another aspect of the invention, RNA molecules of the present invention are preferably expressed from transcription units (see for example Couture et al., 1996, TIG., 12, 510) inserted into DNA or RNA vectors. The recombinant vectors are preferably DNA plasmids or viral vectors. Ribozyme expressing viral vectors can be constructed based on, but not limited to, adeno-associated virus, retrovirus, adenovirus, or alphavirus. Preferably, the recombinant vectors capable of expressing the nucleic acid molecules are delivered as described above, and persist in target cells. Alternatively, viral vectors can be used that provide for transient expression of nucleic acid molecules. Such vectors can be repeatedly administered as necessary. Once expressed, the nucleic acid molecule binds to the target mRNA. Delivery of nucleic acid molecule expressing vectors can be systemic, such as by intravenous or intra-muscular administration, by administration to target cells ex-planted from the patient followed by reintroduction into the patient, or by any other means that would allow for introduction into the desired target cell (for a review see Couture et al., 1996, TIG., 12, 510).

[0144] In one aspect the invention features an expression vector comprising a nucleic acid sequence encoding at least one of the nucleic acid molecules of the instant invention is disclosed. The nucleic acid sequence encoding the nucleic acid molecule of the instant invention is operable linked in a manner which allows expression of that nucleic acid molecule.

[0145] In another aspect the invention features an expression vector comprising: a) a transcription initiation region (e.g., eukaryotic pol I, II or III initiation region); b) a transcription termination region (e.g., eukaryotic pol I, II or III termination region); c) a nucleic acid sequence encoding at least one of the nucleic acid catalyst of the instant invention; and wherein said sequence is operably linked to said initiation region and said termination region, in a manner which allows expression and/or delivery of said nucleic acid molecule. The vector can optionally include an open reading frame (ORF) for a protein operably linked on the 5′ side or the 3′-side of the sequence encoding the nucleic acid catalyst of the invention; and/or an intron (intervening sequences).

[0146] Transcription of the nucleic acid molecule sequences are driven from a promoter for eukaryotic RNA polymerase I (pol I), RNA polymerase II (pol II), or RNA polymerase III (pol III). Transcripts from pol II or pol III promoters are expressed at high levels in all cells; the levels of a given pol II promoter in a given cell type depends on the nature of the gene regulatory sequences (enhancers, silencers, etc.) present nearby. Prokaryotic RNA polymerase promoters are also used, providing that the prokaryotic RNA polymerase enzyme is expressed in the appropriate cells (Elroy-Stein and Moss, 1990, Proc. Natl. Acad. Sci. USA, 87, 6743-7; Gao and Huang 1993, Nucleic Acids Res., 21, 2867-72; Lieber et al., 1993, Methods Enzymol., 217, 47-66; Zhou et al., 1990, Mol. Cell. Biol., 10, 4529-37). All of these references are incorporated by reference herein. Several investigators have demonstrated that nucleic acid molecules, such as ribozymes expressed from such promoters can function in mammalian cells (e.g. Kashani-Sabet et al., 1992, Antisense Res. Dev., 2, 3-15; Ojwang et al. 1992, Proc. Natl. Acad. Sci. USA, 89, 10802-6; Chen et al., 1992, Nucleic Acids Res., 20, 4581-9; Yu et al., 1993, Proc. Natl. Acad. Sci. USA, 90, 6340-4; L'Huillier et al., 1992, EMBO J., 11, 4411-8; Lisziewicz et al., 1993, Proc. Natl. Acad. Sci. U.S.A, 90, 8000-4; Thompson et al., 1995, Nucleic Acids Res., 23, 2259; Sullenger & Cech, 1993, Science, 262, 1566). More specifically, transcription units such as the ones derived from genes encoding U6 small nuclear (snRNA), transfer RNA (tRNA) and adenovirus VA RNA are useful in generating high concentrations of desired RNA molecules such as ribozymes in cells (Thompson et al., supra; Couture and Stinchcomb, 1996, supra; Noonberg et al., 1994, Nucleic Acid Res., 22, 2830; Noonberg et al., U.S. Pat. No. 5,624,803; Good et al., 1997, Gene Ther., 4, 45; Beigelman et al., International PCT Publication No. WO 96/18736; all of these publications are incorporated by reference herein. The above ribozyme transcription units can be incorporated into a variety of vectors for introduction into mammalian cells, including but not restricted to, plasmid DNA vectors, viral DNA vectors (such as adenovirus or adeno-associated virus vectors), or viral RNA vectors (such as retroviral or alphavirus vectors) (for a review see Couture and Stinchcomb, 1996, supra).

[0147] In another aspect the invention features an expression vector comprising nucleic acid sequence encoding at least one of the nucleic acid molecules of the invention, in a manner which allows expression of that nucleic acid molecule. The expression vector comprises in one embodiment; a) a transcription initiation region; b) a transcription termination region; c) a nucleic acid sequence encoding at least one said nucleic acid molecule; and wherein said sequence is operably linked to said initiation region and said termination region, in a manner which allows expression and/or delivery of said nucleic acid molecule.

[0148] In another embodiment the expression vector comprises: a) a transcription initiation region, b) a transcription termination region; c) an open reading frame; d) a nucleic acid sequence encoding at least one said nucleic acid molecule, wherein said sequence is operably linked to the 3′-end of said open reading frame; and wherein said sequence is operably linked to said initiation region, said open reading frame and said termination region, in a manner which allows expression and/or delivery of said nucleic acid molecule. In yet another embodiment the expression vector comprises: a) a transcription initiation region; b) a transcription termination region; c) an intron; d) a nucleic acid sequence encoding at least one said nucleic acid molecule; and wherein said sequence is operably linked to said initiation region, said intron and said termination region, in a manner which allows expression and/or delivery of said nucleic acid molecule.

[0149] In another embodiment, the expression vector comprises: a) a transcription initiation region; b) a transcription termination region; c) an intron; d) an open reading frame; e) a nucleic acid sequence encoding at least one said nucleic acid molecule, wherein said sequence is operably linked to the 3′-end of said open reading frame; and wherein said sequence is operably linked to said initiation region, said intron, said open reading frame and said termination region, in a manner which allows expression and/or delivery of said nucleic acid molecule.

### EXAMPLES

[0150] The following are non-limiting examples showing the selection, isolation, synthesis and activity of nucleic acids of the instant invention.

[0151] The following examples demonstrate the selection and design of Antisense, hammerhead, DNAzyme, NCH, Amberzyme, Zinzyme, or G-Cleaver ribozyme molecules and binding/cleavage sites within NOGO and NOGO receptor RNA.

[0152] Nucleic Acid Inhibition of NOGO and NOGO Receptor Target RNA

[0153] The lack of axon regeneration capacity in the adult CNS manifests as a limiting factor in the treatment of CNS injury, cerebrovascular accident (CVA, stroke), chemotherapy-induced neuropathy, and possibly in neurodegenerative diseases such as Alzheimer's disease, dementia, multiple sclerosis (MS), chemotherapy-induced neuropathy, amyotrophic lateral sclerosis (ALS), Parkinson's disease, ataxia, Huntington's disease, Creutzfeldt-Jakob disease, and/or muscular dystrophy. Neuron growth inhibition results from physical barriers imposed by glial scars, a lack of neurotrophic factors, and growth-inhibitory molecules associated with myelin. The abrogation of neurite growth inhibition creates the potential to treat conditions for which there is currently no definitive medical intervention. The inhibition of NOGO (Genbank Accession No AB020693) and NOGO-66 receptor (Genbank Accession No. AF283463) is demonstrated in the following examples.

### Example 1

### Identification of Potential Target Sites in Human NOGO RNA

[0154] The sequence of human NOGO and NOGO receptor genes are screened for accessible sites using a computer-folding algorithm. Regions of the RNA that do not form secondary folding structures and contained potential enzymatic nucleic acid molecule and/or antisense binding/cleavage sites are identified. The sequences of these binding/cleavage sites are shown in Tables III-VII.

### Example 2

### Selection of Enzymatic Nucleic Acid Cleavage Sites in Human NOGO and NOGO Receptor RNA

[0155] Enzymatic nucleic acid molecule target sites are chosen by analyzing sequences of Human NOGO (Genbank accession No: AB020693) and prioritizing the sites on the basis of folding. Enzymatic nucleic acid molecules are designed that can bind each target and are individually analyzed by computer folding (Christoffersen et al., 1994 J. Mol. Struc. Theochem, 311, 273; Jaeger et al., 1989, Proc. Natl. Acad. Sci. USA, 86, 7706) to assess whether the enzymatic nucleic acid molecule sequences fold into the appropriate secondary structure. Those enzymatic nucleic acid molecules with unfavorable intramolecular interactions between the binding arms and the catalytic core are eliminated from consideration. As noted below, varying binding arm lengths can be chosen to optimize activity. Generally, at least 5 bases on each arm are able to bind to, or otherwise interact with, the target RNA.

### Example 3

### Chemical Synthesis and Purification of Ribozymes and Antisense for Efficient Cleavage and/or Blocking of NOGO and NOGO Receptor RNA

[0156] Enzymatic nucleic acid molecules and antisense constructs are designed to anneal to various sites in the RNA message. The binding arms of the enzymatic nucleic acid molecules are complementary to the target site sequences described above, while the antisense constructs are fully complimentary to the target site sequences described above. The enzymatic nucleic acid molecules and antisense constructs were chemically synthesized. The method of synthesis used followed the procedure for normal RNA synthesis as described above and in Usman et al., (1987 J. Am. Chem. Soc., 109, 7845), Scaringe et al., (1990 Nucleic Acids Res., 18, 5433) and Wincott et al., supra, and made use of common nucleic acid protecting and coupling groups, such as dimethoxytrityl at the 5′-end, and phosphoramidites at the 3′-end. The average stepwise coupling yields were typically >98%.

[0157] Enzymatic nucleic acid molecules and antisense constructs are also synthesized from DNA templates using bacteriophage T7 RNA polymerase (Milligan and Uhlenbeck, 1989, Methods Enzymol. 180, 51). Enzymatic nucleic acid molecules and antisense constructs are purified by gel electrophoresis using general methods or are purified by high pressure liquid chromatography (HPLC; See Wincott et al., supra; the totality of which is hereby incorporated herein by reference) and are resuspended in water. The sequences of the chemically synthesized enzymatic nucleic acid molecules used in this study are shown below in Table III-VII. The sequences of the chemically synthesized antisense constructs used in this study are complimentary sequences to the Substrate sequences shown below as in Table III-VII.

### Example 4

### Enzymatic Nucleic Acid Molecule Cleavage of NOGO and NOGO Receptor RNA Target in Vitro

[0158] Enzymatic nucleic acid molecules targeted to the human NOGO RNA are designed and synthesized as described above. These enzymatic nucleic acid molecules can be tested for cleavage activity in vitro, for example, using the following procedure. The target sequences and the nucleotide location within the NOGO receptor RNA are given in Tables III-VII.

[0159] Cleavage Reactions: Full-length or partially full-length, internally-labeled target RNA for enzymatic nucleic acid molecule cleavage assay is prepared by in vitro transcription in the presence of [a-³²P] CTP, passed over a G 50 Sephadex column by spin chromatography and used as substrate RNA without further purification. Alternately, substrates are 5′-³²P-end labeled using T4 polynucleotide kinase enzyme. Assays are performed by pre-warming a 2× concentration of purified enzymatic nucleic acid molecule in enzymatic nucleic acid molecule cleavage buffer (50 mM Tris-HCl, pH 7.5 at 37° C., 10 mM MgCl₂) and the cleavage reaction was initiated by adding the 2× enzymatic nucleic acid molecule mix to an equal volume of substrate RNA (maximum of 1-5 nM) that was also pre-warmed in cleavage buffer. As an initial screen, assays are carried out for 1 hour at 37° C. using a final concentration of either 40 nM or 1 mM enzymatic nucleic acid molecule, i.e., enzymatic nucleic acid molecule excess. The reaction is quenched by the addition of an equal volume of 95% formamide, 20 mM EDTA, 0.05% bromophenol blue and 0.05% xylene cyanol after which the sample is heated to 95° C. for 2 minutes, quick chilled and loaded onto a denaturing polyacrylamide gel. Substrate RNA and the specific RNA cleavage products generated by enzymatic nucleic acid molecule cleavage are visualized on an autoradiograph of the gel. The percentage of cleavage is determined by Phosphor Imager® quantitation of bands representing the intact substrate and the cleavage products.

### Example 5

### Nucleic Acid Inhibition of NOGO and NOGO Receptor Target RNA in Vivo

[0160] Nucleic acid molecules targeted to the human NOGO and NOGO receptor RNA are designed and synthesized as described above. These nucleic acid molecules can be tested for cleavage activity in vivo, for example using the procedures described below. The target sequences and the nucleotide location within the NOGO receptor RNA are given in Tables III-VII.

[0161] Cell Culture

[0162] Spillmann et al., 1998, J. Biol. Chem., 273, 19283-19293, describe the purification and biochemical characterization of a high molecular mass protein of bovine spinal cord myelin (bNI-220) which exerts potent inhibition of neurite outgrowth of NGF-primed PC12 cells and chick DRG cells. This protein can be used to inhibit spreading of 3T3 fibroblasts and to induce collapse of chick DRG growth cones. The monoclonal antibody, mAb IN-1, can be used to fully neutralize the inhibitory activity of bNI-220, which is a presumed NOGO gene product. As such, nucleic acid molecules of the instant invention directed at the inhibition of NOGO expression can be used in place of mAb IN-1 in studying the inhibition of bNI-220 in cell culture experiments described in detail by Spillmann et al., supra. Criteria used in these experiments include the evaluation of spreading behavior of 3T3 fibroblasts, the neurite outgrowth response of PC12 cells, and the growth cone motility of chick DRG growth cones. Similarly, nucleic acid molecules of the instant invention that target NOGO or NOGO receptors can be used to evaluate inhibition of NOGO mediated activity in these cell types using the criteria described above.

[0163] Fournier et al., 2001, Nature, 409, 341 describe a mouse clone of the NOGO-66 receptor which is expressed in non-neuronal COS-7 cells. The transfected COS-7 cell line expresses NOGO-66 receptor protein on the cell surface. An antiserum developed to the NOGO-66 receptor can be used to specifically stain NOGO-66 receptor expressing cells by immunohistochemical staining. As such, an assay for screening nucleic acid-based inhibitors of NOGO-66 receptor expression is provided.

[0164] Animal Models

[0165] Bregman et al., 1995, Nature, 378, 498-501 and Z'Graggen et al., 1998, J. Neuroscience, 18, 4744, describe a rat based system for evaluating the role of myelin-associated neurite growth inhibitory proteins in vivo. Young adult Lewis rats receive a mid-thoracic microsurgical spinal cord lesion or a unilateral pyramidotomy. These animals are then treated with mAb IN-1 secreting hybridoma cell explants. A control population receive hybridoma explants which secrete horsreradish peroxidase (HRP) antibodies. Cyclosporin is used during the treatment period to allow hybridoma survival. Additional control rats receive either the spinal cord lesion without any further treatment or no lesion. After a 4-6 week recovery period, behavioral training is followed by the quantitative analysis of reflex and locomotor function. IN-1 treated animals demonstrate growth of corticospinal axons around the lesion site and into the spinal cord which persist past the longest time point of analysis (12 weeks). Furthermore, both reflex and locomotor function, including the functional recovery of fine motor control, is restored in IN-1 treated animals. As such, a robust animal model as described by Bregman et a.,l supra and Z'Graggen et al., supra, can be used to evaluate nucleic acid molecules of the instant invention when used in place of or in conjunction with mAb IN-1 toward use as modulators of neurite growth inhibitor function (eg. NOGO and NOGO receptor) in vivo.

[0166] Indications

[0167] The nucleic acids of the present invention can be used to treat a patient having a condition associated with the level of NOGO or NOGO receptor. One method of treatment comprises contacting cells of a patient with a nucleic acid molecule of the present invention, under conditions suitable for said treatment. Delivery methods and other methods of administration have been discussed herein and are commonly known in the art. Particular degenerative and disease states that can be associated with NOGO and NOGO receptor expression modulation include, but are not limited to, CNS injury, specifically spinal cord injury, cerebrovascular accident (CVA, stroke), Alzheimer's disease, dementia, multiple sclerosis (MS), chemotherapy-induced neuropathy, amyotrophic lateral sclerosis (ALS), Parkinson's disease, ataxia, Huntington's disease, Creutzfeldt-Jakob disease, muscular dystrophy, and/or other neurodegenerative disease states which respond to the modulation of NOGO and NOGO receptor expression.

[0168] The present body of knowledge in NOGO research indicates the need for methods to assay NOGO activity and for compounds that can regulate NOGO expression for research, diagnostic, and therapeutic use.

[0169] Other treatment methods comprise contacting cells of a patient with a nucleic acid molecule of the present invention and further comprise the use of one or more drug therapies under conditions suitable for said treatment. The use of monoclonal antibody (eg; mAb IN-1) treatment, growth factors, antiinflammatory compounds, for example methylprednisolone, calcium blockers, apoptosis inhibiting compounds, for example GM-1 ganglioside, and physical therapies, for example treadmill therapy, are all non-limiting examples of methods that can be combined with or used in conjunction with the nucleic acid molecules (e.g. ribozymes and antisense molecules) of the instant invention. Those skilled in the art will recognize that other drug compounds and therapies can be similarly be readily combined with the nucleic acid molecules of the instant invention (e.g. ribozymes and antisense molecules) are hence within the scope of the instant invention.

[0170] Diagnostic Uses

[0171] The nucleic acid molecules of this invention (e.g., enzymatic nucleic acid molecules) can be used as diagnostic tools to examine genetic drift and mutations within diseased cells or to detect the presence of NOGO and/or NOGO receptor RNA in a cell. The close relationship between enzymatic nucleic acid molecule activity and the structure of the target RNA allows the detection of mutations in any region of the molecule which alters the base-pairing and three-dimensional structure of the target RNA. By using multiple enzymatic nucleic acid molecules described in this invention, one can map nucleotide changes which are important to RNA structure and function in vitro, as well as in cells and tissues. Cleavage of target RNAs with enzymatic nucleic acid molecules can be used to inhibit gene expression and define the role (essentially) of specified gene products in the progression of disease. In this manner, other genetic targets can be defined as important mediators of the disease. These experiments can lead to better treatment of the disease progression by affording the possibility of combinational therapies (e.g., multiple enzymatic nucleic acid molecules targeted to different genes, enzymatic nucleic acid molecules coupled with known small molecule inhibitors, or intermittent treatment with combinations of enzymatic nucleic acid molecules and/or other chemical or biological molecules). Other in vitro uses of enzymatic nucleic acid molecules of this invention are well known in the art, and include detection of the presence of mRNAs associated with NOGO-related condition. Such RNA is detected by determining the presence of a cleavage product after treatment with a enzymatic nucleic acid molecule using standard methodology.

[0172] In a specific example, enzymatic nucleic acid molecules which cleave only wild-type or mutant forms of the target RNA are used for the assay. The first enzymatic nucleic acid molecule is used to identify wild-type RNA present in the sample and the second enzymatic nucleic acid molecule is used to identify mutant RNA in the sample. As reaction controls, synthetic substrates of both wild-type and mutant RNA are cleaved by both enzymatic nucleic acid molecules to demonstrate the relative enzymatic nucleic acid molecule efficiencies in the reactions and the absence of cleavage of the “non-targeted” RNA species. The cleavage products from the synthetic substrates also serve to generate size markers for the analysis of wild-type and mutant RNAs in the sample population. Thus each analysis requires two enzymatic nucleic acid molecules, two substrates and one unknown sample which is combined into six reactions. The presence of cleavage products is determined using an RNAse protection assay so that full-length and cleavage fragments of each RNA can be analyzed in one lane of a polyacrylamide gel. It is not absolutely required to quantify the results to gain insight into the expression of mutant RNAs and putative risk of the desired phenotypic changes in target cells. The expression of mRNA whose protein product is implicated in the development of the phenotype (i.e., NOGO) is adequate to establish risk. If probes of comparable specific activity are used for both transcripts, then a qualitative comparison of RNA levels will be adequate and will decrease the cost of the initial diagnosis. Higher mutant form to wild-type ratios are correlated with higher risk whether RNA levels are compared qualitatively or quantitatively. The use of enzymatic nucleic acid molecules in diagnostic applications contemplated by the instant invention is more fully described in George et al., U.S. Pat. Nos. 5,834,186 and 5,741,679, Shih et al., U.S. Pat. No. 5,589,332, Nathan et al., U.S. Pat. No. 5,871,914, Nathan and Ellington, International PCT publication No. WO 00/24931, and Sullenger et al., International PCT publication No. WO 99/29842.

[0173] Additional Uses

[0174] Potential uses of sequence-specific enzymatic nucleic acid molecules of the instant invention can have many of the same applications for the study of RNA that DNA restriction endonucleases have for the study of DNA (Nathans et al., 1975 Ann. Rev. Biochem. 44:273). For example, the pattern of restriction fragments can be used to establish sequence relationships between two related RNAs, and large RNAs can be specifically cleaved to fragments of a size more useful for study. The ability to engineer sequence specificity of the enzymatic nucleic acid molecule is ideal for cleavage of RNAs of unknown sequence. Applicant has described the use of nucleic acid molecules to down-regulate gene expression of target genes in bacterial, microbial, fungal, viral, and eukaryotic systems including plant, or mammalian cells.

[0175] All patents and publications mentioned in the specification are indicative of the levels of skill of those skilled in the art to which the invention pertains. All references cited in this disclosure are incorporated by reference to the same extent as if each reference had been incorporated by reference in its entirety individually.

[0176] One skilled in the art would readily appreciate that the present invention is well adapted to carry out the objects and obtain the ends and advantages mentioned, as well as those inherent therein. The methods and compositions described herein as presently representative of preferred embodiments are exemplary and are not intended as limitations on the scope of the invention. Changes therein and other uses will occur to those skilled in the art, which are encompassed within the spirit of the invention, are defined by the scope of the claims.

[0177] It will be readily apparent to one skilled in the art that varying substitutions and modifications can be made to the invention disclosed herein without departing from the scope and spirit of the invention. Thus, such additional embodiments are within the scope of the present invention and the following claims.

[0178] The invention illustratively described herein suitably can be practiced in the absence of any element or elements, limitation or limitations which is not specifically disclosed herein. Thus, for example, in each instance herein any of the terms “comprising”, “consisting essentially of” and “consisting of” may be replaced with either of the other two terms. The terms and expressions which have been employed are used as terms of description and not of limitation, and there is no intention that in the use of such terms and expressions of excluding any equivalents of the features shown and described or portions thereof, but it is recognized that various modifications are possible within the scope of the invention claimed. Thus, it should be understood that although the present invention has been specifically disclosed by preferred embodiments, optional features, modification and variation of the concepts herein disclosed may be resorted to by those skilled in the art, and that such modifications and variations are considered to be within the scope of this invention as defined by the description and the appended claims.

[0179] In addition, where features or aspects of the invention are described in terms of Markush groups or other grouping of alternatives, those skilled in the art will recognize that the invention is also thereby described in terms of any individual member or subgroup of members of the Markush group or other group. Other embodiments are within the claims that follow.

TABLE I
Characteristics of naturally occurring ribozymes
Group I Introns
Size: ˜150 to >1000 nucleotides.
Requires a U in the target sequence immediately 5′ of the cleavage site.
Binds 4-6 nucleotides at the 5′-side of the cleavage site.
Reaction mechanism: attack by the 3′-OH of guanosine to generate cleavage
products with 3′-OH and 5′-guanosine.
Additional protein cofactors required in some cases to help folding and
maintenance of the active structure.
Over 300 known members of this class. Found as an intervening sequence in
Tetrahymena thermophila rRNA, fungal mitochondria, chloroplasts, phage T4, blue-
green algae, and others.
Major structural features largely established through phylogenetic comparisons,
mutagenesis, and biochemical studies ^{[i, ii]}.
Complete kinetic framework established for one ribozyme ^{[iii, iv, v, vi]}.
Studies of ribozyme folding and substrate docking underway ^{[vii, viii, ix]}.
Chemical modification investigation of important residues well established ^{[x, xi]}.
The small (4-6 nt) binding site may make this ribozyme too non-specific for
targeted RNA cleavage, however, the Tetrahymena group I intron has been used
to repair a “defective” β-galactosidase message by the ligation of new β
galactosidase sequences onto the defective message ^{[xii]}.
+UZ,k1/12 RNAse P RNA (M1 RNA)
Size: ˜290 to 400 nucleotides.
RNA portion of a ubiquitous ribonucleoprotein enzyme.
Cleaves tRNA precursors to form mature tRNA ^{[xiii]}.
Reaction mechanism: possible attack by M²⁺—OH to generate cleavage products
with 3′-OH and 5′-phosphate.
RNAse P is found throughout the prokaryotes and eukaryotes. The RNA subunit
has been sequenced from bacteria, yeast, rodents, and primates.
Recruitment of endogenous RNAse P for therapeutic applications is possible
through hybridization of an External Guide Sequence (EGS) to the target RNA
^{[xiv, xv]}
Important phosphate and 2′ OH contacts recently identified ^{[xvi, xvii]}
Group II Introns
Size: >1000 nucleotides.
Trans cleavage of target RNAs recently demonstrated ^{[xviii, xix]}.
Sequence requirements not fully determined.
Reaction mechanism: 2′-OH of an internal adenosine generates cleavage products
with 3′-OH and a “lariat” RNA containing a 3′-5′ and a 2′-5′ branch point.
Only natural ribozyme with demonstrated participation in DNA cleavage ^{[xx, xxi]} in
addition to RNA cleavage and ligation.
Major structural features largely established through phylogenetic comparisons
^{[xxii]}.
Important 2′ OH contacts beginning to be identified ^{[xxiii]}
Kinetic framework under development ^{[xxiv]}
Neurospora VS RNA
Size: ˜144 nucleotides.
Trans cleavage of hairpin target RNAs recently demonstrated ^{[XXV]}.
Sequence requirements not fully determined.
Reaction mechanism: attack by 2′-OH 5′ to the scissile bond to generate cleavage
products with 2′, 3′-cyclic phosphate and 5′-OH ends.
Binding sites and structural requirements not fully determined.
Only 1 known member of this class. Found in Neurospora VS RNA.
Hammerhead Ribozyme
(see text for references)
Size: ˜13 to 40 nucleotides.
Requires the target sequence UH immediately 5′of the cleavage site.
Binds a variable number nucleotides on both sides of the cleavage site.
Reaction mechanism: attack by 2′-OH 5′ to the scissile bond to generate cleavage
products with 2′,3′-cyclic phosphate and 5′-OH ends.
14 known members of this class. Found in a number of plant pathogens
(virusoids) that use RNA as the infectious agent.
Essential structural features largely defined, including 2 crystal structures ^{[xxvi, xxvii]}
Minimal ligation activity demonstrated (for engineering through in vitro selection)
^{[xxviii]}
Complete kinetic framework established for two or more ribozymes ^{[xxix]}.
Chemical modification investigation of important residues well established ^{[xxx]}.
Hairpin Ribozyme
Size: ˜50 nucleotides.
Requires the target sequence GUC immediately 3′ of the cleavage site.
Binds 4-6 nucleotides at the 5′-side of the cleavage site and a variable number to
the 3′-side of the cleavage site.
Reaction mechanism: attack by 2′-OH 5′ to the scissile bond to generate cleavage
products with 2′,3′-cyclic phosphate and 5′-OH ends.
3 known members of this class. Found in three plant pathogen (satellite RNAs of
the tobacco ringspot virus, arabis mosaic virus and chicory yellow mottle virus)
which uses RNA as the infectious agent.
Essential structural features largely defined ^{[xxxi, xxxii, xxxiii, xxxiv]}
Ligation activity (in addition to cleavage activity) makes ribozyme amenable to
engineering through in vitro selection ^{[xxxv]}
Complete kinetic framework established for one ribozyme ^{[xxxvi]}.
Chemical modification investigation of important residues begun ^{[xxxvii, xxxviii]}.
Hepatitis Delta Virus (HDV) Ribozyme
Size: ˜60 nucleotides.
Trans cleavage of target RNAs demonstrated ^{[xxxix]}.
Binding sites and structural requirements not fully determined, although no
sequences 5′ of cleavage site are required. Folded ribozyme contains a pseudoknot
structure ^{[xl]}.
Reaction mechanism: attack by 2′-OH 5′ to the scissile bond to generate cleavage
products with 2′,3′-cyclic phosphate and 5′-OH ends.
Only 2 known members of this class. Found in human HDV.
Circular form of HDV is active and shows increased nuclease stability ^{[xli]}
^{[i]} Michel, Francois; Westhof, Eric. Slippery substrates. Nat. Struct. Biol. (1994), 1(1), 5-7.
^{[ii]} Lisacek, Frederique; Diaz, Yolande; Michel, Francois. Automatic identification of group I intron cores in genomic DNA sequences. J. Mol. Biol. (1994), 235(4), 1206-17.
^{[iii]} Herschlag, Daniel; Cech, Thomas R.. Catalysis of RNA cleavage by the Tetrahymena thermophila ribozymes. 1. Kinetic description of the reaction of an RNA substrate complementary to the active site. Biochemistry (1990), 29(44), 10159-71.
^{[iv]} Herschlag, Daniel; Cech, Thomas R.. Catalysis of RNA cleavage by the Tetrahymena thermophila ribozyme. 2. Kinetic description of the reaction of an RNA substrate that forms a mismatch at the active site. Biochemistry (1990), 29(44), 10172-80.
^{[v]} Knitt, Deborah S.; Herschlag, Daniel. pH Dependencies of the Tetrahymena Ribozyme Reveal an Unconventional Origin of an Apparent pKa. Biochemistry (1996), 35(5), 1560-70.
^{[vi]} Bevilacqua, Philip C.; Sugimoto, Naoki; Turner, Douglas H.. A mechanistic framework for the second step of splicing catalyzed by the Tetrahymena ribozyme. Biochemistry (1996), 35(2), 648-58.
^{[vii]} Li, Yi; Bevilacqua, Philip C.; Mathews, David; Turner, Douglas H.. Thermodynamic and activation parameters for binding of a pyrene-labeled substrate by the Tetraymena ribozyme: docking is not diffusion-controlled and is driven by a favorite entropy change. Biochemistry (1995), 34(44), 14394-9.
^{[iii]} Banerjee, Aloke Raj; Turner, Douglas H.. The time dependence of chemical modification reveals slow steps in the folding of a group I ribozyme. Biochemistry (1995), 34(19), 6504-12.
^{[ix]} Zarrinkar, Patrick P.; Williamson, James R.. The P9.1-P9.2 peripheral extension helps guide folding of the Tetrahymena ribozyme. Nucleic Acids Res. (1996), 24(5), 854-8.
^{[x]} Strobel, Scott A.; Cech, Thomas R.. Minor groove recognition of the conserved G.cntdot.U pair at the Tetrahymena ribozyme reaction site. Science (Washington, D.C.) (1995), 267(5198), 675-9.
^{[xi]} Strobel, Scott A.; Cech, Thomas R.. Exocyclic Amine of the Conserved G.cntdot.U Pair at the Cleavage Site of the Tetrahymena Ribozyme Contributes to 5′-Splice Site Selection and Transition State Stabilization. Biochemistry (1996), 35(4), 1201-11.
^{[xii]} Sullenger, Bruce A.; Cech, Thomas R.. Ribozyme-mediated repair of defective mRNA by targeted trans-splicing. Nature (London) (1994), 731(6498), 619-22.
^{[xiii]} Robertson, H.D.; Altman, S.; Smith, J.D. J. Biol. Chem., 247, 5243-5251 (1972).
^{[xiv]} Forster, Anthony C.; Altman, Sidney. External guide sequences for an RNA enzyme. Science (Washington, D.C., 1883-) (1990), 249(4970), 783-6.
^{[xv]} Yuan, Y.; Hwang, E.S.; Altman, S. Targeted cleavage of mRNA by human RNase P. Proc. Natl. Acad. Sci. USA (1992) 89, 8006-10.
^{[xvi]} Harris, Michael E.; Pace, Norman R.. Identification of phosphates involved in catalysis by the ribozyme RNase P RNA. RNA (1995), 1(2), 210-18.
^{[xvii]} Pan, Tao; Loria, Andrew; Zhong, Kun. Probing of tertiary interactions in RNA: 2′-hydroxyl-base contacts between the RNase P RNA and pre-tRNA. Proc. Natl. Acad. Sci. U.S.A. (1995), 92(26), 12510-14.
^{[xviii]} Pyle, Anna Marie; Green, Justin B.. Building a Kinetic Framework for Group II Intron Ribozyme Activity: Quantitation of Interdomain Binding and Reaction Rate. Biochemistry (1994), 33(9), 2716—25.
^{[xix]} Michels, William J. Jr.; Pyle, Anna Marie. Conversion of a Group II Intron into a New Multiple-Turnover Ribozyme that Selectively Cleaves Oligonucleotides: Elucidation of Reaction Mechanism and Structure/Function Relationships. Biochemistry (1995), 34(9), 2965-77.
^{[xx]} Zimmerly, Steven; Guo, Huatro; Eskes, Robert; Yang, Jian; Perlman, Philip S.; Lambowitz, Alan M.. A group II intron RNA is a catalyst component of a DNA endonuclease involved in intron mobility. Cell (Cambridge, Mass.) (1995), 83(4), 529-38.
^{[xxi]} Griffin, Edmund A., Jr.; Qin, Zhifeng; Michels, Williams J., Jr.; Pyle, Anna Marie. Group II intron ribozymes that cleave DNA and RNA linkages with similar efficiency, and lack contacts with substrate 2′-hydroxyl groups. Chem. Biol. (1995), 2(11), 761-70.
^{[xxii]} Michel, Francois; Ferat, Jean Luc. Structure and activities of group II introns. Annu. Rev. Biochem. (1995), 64, 435-61.
^{[xxiii]} Abramovitz, Dana L.; Friedman, Richard A.; Pyle, Anna Marie. Catalytic role of 2′-hydroxyl groups within a group II intron active site. Science (Washington, D.C.) (1996), 271(5254), 1410-13.
^{[xxiv]} Daniels, Danette L.; Michels, William J., Jr.; Pyle, Anna Marie. Two competing pathways for self-splicing by group II introns: a quantitative analysis of in vitro reaction rates and products. J. Mol. Biol. (1996), 256(1), 31-49.
^{[xxv]} Guo, Hans C.T.; Collins, Richard A.. Efficient trans-cleavage of a stem-loop RNA substrate by a ribozyme derived from Neuropora VS RNA. EMBOJ. (1995), 14(2), 368-76.
^{[xxvi]} Scott, W.G., Finch, J.T., Aaron, K. The crystal structure of an all RNA hammerhead ribozyme: Aproposed mechanism for RNA catalytic cleavage. Cell, (1995), 81,991-1002.
^{[xxvii]} McKay, Structure and function of the hammerhead ribozyme: an unfinished story. RNA, (1996), 2, 395-403.
^{[xxviii]} Long, D., Uhlenbeck, O., Hertel, K. Ligation with hammerhead ribozymes. U.S. Pat. No. 5,633,133.
^{[xxix]} Hertel, K.J., Herschlag, D., Uhlenbeck, O. A kinetic and thermodynamic framework for the hammerhead ribozyme reaction. Biochemistry, (1994) 33, 3374-3385. Beigelman, L., et al., Chemical modifications of hammerhead ribozymes. J. Biol. Chem., (1995) 270, 25702-25708.
^{[xxx]} Beigelman, L., et al., Chemical modifications of hammerhead ribozymes. J. Biol. Chem., (1995) 270, 25702-25708.
^{[xxxi]} Hampel, Arnold; Tritz, Richard; Hicks, Margaret; Cruz, Philip. ‘Hairpin’ catalytic RNA model: evidence for helixes and sequence requirement for substrate RNA. Nucleic Acids Res. (1990), 18(2), 299-304.
^{[xxxii]} Chowrira, Bharat M.; Berzal-Herranz, Alfredo; Burke, John M.. Novel guanosine requirement for catalysis by the hairpin ribozyme. Nature (London) (1991), 354(6351), 320-2.
^{[xxxiii]} Berzal-Herranz, Alfredo; Joseph, Simpson; Chowrira, Bharat M.; Butcher, Samuel E.; Burke, John M.. Essential nucleotide sequences and secondary structure elements of the hairpin ribozyme. EMBOJ. (1993), 12(6), 2567-73.
^{[xxxiv]} Joseph, Simpson; Berzal-Herranz, Alfredo; Chowrira, Bharat M.; Butcher, Samuel E.. Substrate selection rules for the hairpin ribozyme determined by in vitro selection, mutation, and analysis of mismatched substrates. Genes Dev. (1993), 7(1), 130-8.
^{[xxxv]} Berzal-Herranz, Alfredo; Joseph, Simpson; Burke, John M.. In vitro selection of active hairpin ribozymes by sequential RNA-catalyzed cleavage and ligation reactions. Genes Dev. (1992), 6(1), 129-34.
^{[xxxvi]} Hegg, Lisa A.; Fedor, Martha J.. Kinetics and Thermodynamics of Intermolecular Catalysis by Hairpin Ribozymes. Biochemistry (1995), 34(48), 15813-28.
^{[xxxvii]} Grasby, Jane A.; Mersmann, Karin; Singh, Mohinder; Gait, Michael J.. Purine Functional Groups in Essential Residues of the Hairpin Ribozyme Required for Catalytic Cleavage of RNA. Biochemistry (1995), 34(12), 4068-76.
^{[xxxviii]} Schmidt, Sabine; Beigelman, Leonid; Karpeisky, Alexander; Usman, Nassim; Sorensen, Ulrik S.; Gait, Michael J.. Base and sugar requirements for RNA cleavage of essential nucleoside residues in internal loop B of the hairpin ribozyme: implications for secondary structure. Nucleic Acids Res. (1996), 24(4), 573-81 .
^{[xxxix]} Perrotta, Anne T.; Been, Michael D.. Cleavage of oligoribonucleotides by a ribozyme derived from the hepatitis .delta. virus RNA sequence. Biochemistry (1992), 31(1), 16-21.
^{[xl]} Perrotta, Anne T.; Been, Michael D.. A pseudoknot-like structure required for efficient self-cleavage of hepatitis .delta. virus RNA. Nature (London) (1991), 350(6317), 434-6.
^{[xli]} Puttaraju, M.; Perrotta, Anne T.; Been, Michael D.. A circular trans-acting hepatitis delta virus ribozyme. Nucleic Acids Res. (1993), 21(18), 4253-8.

[0180] TABLE II
A. 2.5 μmol Synthesis Cycle ABI 394 Instrument

| Reagent | Equivalents | Amount | | Wait Time* DNA | | Wait Time* 2′-O-methyl | | Wait Time* RNA | |
|---|---|---|---|---|---|---|---|---|---|
| Phosphoramidites | 6.5 | 163 | μL | 45 | sec | 2.5 | min | 7.5 | min |
| S-Ethyl Tetrazole | 23.8 | 238 | μL | 45 | sec | 2.5 | min | 7.5 | min |
| Acetic Anhydride | 100 | 233 | μL | 5 | sec | 5 | sec | 5 | sec |
| N-Methyl | 186 | 233 | μL | 5 | sec | 5 | sec | 5 | sec |
| Imidazole | | | | | | | | | |
| TCA | 176 | 2.3 | mL | 21 | sec | 21 | sec | 21 | sec |
| Iodine | 11.2 | 1.7 | mL | 45 | sec | 45 | sec | 45 | sec |
| Beaucage | 12.9 | 645 | μL | 100 | sec | 300 | sec | 300 | sec |

| | | | | | | |
|---|---|---|---|---|---|---|
| Acetonitrile | NA | 6.67 | mL | NA | NA | NA |

B. 0.2 μmol Synthesis Cycle ABI 394 Instrument

| Reagent | Equivalents | Amount | | Wait Time* DNA | | Wait Time* 2′-O-methyl | | Wait Time* RNA | |
|---|---|---|---|---|---|---|---|---|---|
| Phosphoramidites | 15 | 31 | μL | 45 | sec | 233 | sec | 465 | sec |
| S-Ethyl Tetrazole | 38.7 | 31 | μL | 45 | sec | 233 | min | 465 | sec |
| Acetic Anhydride | 655 | 124 | μL | 5 | sec | 5 | sec | 5 | sec |
| N-Methyl | 1245 | 124 | μL | 5 | sec | 5 | sec | 5 | sec |
| Imidazole | | | | | | | | | |
| TCA | 700 | 732 | μL | 10 | sec | 10 | sec | 10 | sec |
| Iodine | 20.6 | 244 | μL | 15 | sec | 15 | sec | 15 | sec |
| Beaucage | 7.7 | 232 | μL | 100 | sec | 300 | sec | 300 | sec |

| | | | | | | |
|---|---|---|---|---|---|---|
| Acetonitrile | NA | 2.64 | mL | NA | NA | NA |

C. 0.2 μmol Synthesis Cycle 96 well Instrument

| | Equivalents: DNA/ | Amount: DNA/2′-O- | | | | Wait Time* 2′-O- | | | |
|---|---|---|---|---|---|---|---|---|---|
| Reagent | 2′-O-methyl/Ribo | methyl/Ribo | | Wait Time* DNA | | methyl | | Wait Time* Ribo | |
| Phosphoramidites | 22/33/66 | 40/60/120 | μL | 60 | sec | 180 | sec | 360 | sec |
| S-Ethyl Tetrazole | 70/105/210 | 40/60/120 | μL | 60 | sec | 180 | min | 360 | sec |
| Acetic Anhydride | 265/265/265 | 50/50/50 | μL | 10 | sec | 10 | sec | 10 | sec |
| N-Methyl | 502/502/502 | 50/50/50 | μL | 10 | sec | 10 | sec | 10 | sec |
| Imidazole | | | | | | | | | |
| TCA | 238/475/475 | 250/500/500 | μL | 15 | sec | 15 | sec | 15 | sec |
| Iodine | 6.8/6.8/6.8 | 80/80/80 | μL | 30 | sec | 30 | sec | 30 | sec |
| Beaucage | 34/51/51 | 80/120/120 | | 100 | sec | 200 | sec | 200 | sec |

| | | | | | | |
|---|---|---|---|---|---|---|
| Acetonitrile | NA | 1150/1150/1150 | μL | NA | NA | NA |

*Wait time does not include contact time during delivery.

[0181] TABLE III
Human NOGO Receptor Hammerhead Ribozyme and Substrate
Sequence

| | | | | Rz |
|---|---|---|---|---|
| | | Seq | | Seq |
| Pos | Substrate | ID | Ribozyme | ID |
| 10 | CAACCCCU A CGAUGAAG | 1 | CUUCAUCG CUGAUGAGGCCGUUAGGCCGAA AGGGGUUG | 1024 |
| 26 | GAGGGCGU C CGCUGGAG | 2 | CUCCAGCG CUGAUGAGGCCGUUAGGCCGAA ACGCCCUC | 1025 |
| 108 | GCCUGCGU A UGCUACAA | 3 | UUGUAGCA CUGAUGAGGCCGUUAGGCCGAA ACGCAGGC | 1026 |
| 113 | CGUAUGCU A CAAUGAGC | 4 | GCUCAUUG CUGAUGAGGCCGUUAGGCCGAA AGCAUACG | 1027 |
| 177 | GUGGGCAU C CCUGCUGC | 5 | GCAGCAGG CUGAUGAGGCCGUUAGGCCGAA AUGCCCAC | 1028 |
| 198 | CAGCGCAU C UUCCUGCA | 6 | UGCAGGAA CUGAUGAGGCCGUUAGGCCGAA AUGCGCUG | 1029 |
| 200 | GCGCAUCU U CCUGCACG | 7 | CGUGCAGG CUGAUGAGGCCGUUAGGCCGAA AGAUGCGC | 1030 |
| 201 | CGCAUCUU C CUGCACGG | 8 | CCGUGCAG CUGAUGAGGCCGUUAGGCCGAA AAGAUGCG | 1031 |
| 219 | AACCGCAU C UCGCAUGU | 9 | ACAUGCGA CUGAUGAGGCCGUUAGGCCGAA AUGCGGUU | 1032 |
| 221 | CCGCAUCU C GCAUGUGC | 10 | GCACAUGC CUGAUGAGGCCGUUAGGCCGAA AGAUGCGG | 1033 |
| 242 | UGCCAGCU U CCGUGCCU | 11 | AGGCACGG CUGAUGAGGCCGUUAGGCCGAA AGCUGGCA | 1034 |
| 243 | GCCAGCUU C CGUGCCUG | 12 | CAGGCACG CUGAUGAGGCCGUUAGGCCGAA AAGCUGGC | 1035 |
| 261 | CGCAACCU C ACCAUCCU | 13 | AGGAUGGU CUGAUGAGGCCGUUAGGCCGAA AGGUUGCG | 1036 |
| 267 | CUCACCAU C CUGUGGCU | 14 | AGCCACAG CUGAUGAGGCCGUUAGGCCGAA AUGGUGAG | 1037 |
| 281 | GCUGCACU C GAAUGUGC | 15 | GCACAUUC CUGAUGAGGCCGUUAGGCCGAA AGUGCAGC | 1038 |
| 300 | GCCCGAAU U GAUGCGGC | 16 | GCCGCAUC CUGAUGAGGCCGUUAGGCCGAA AUUCGGGC | 1039 |
| 314 | GGCUGCCU U CACUGGCC | 17 | GGCCAGUG CUGAUGAGGCCGUUAGGCCGAA AGGCAGCC | 1040 |
| 315 | GCUGCCUU C ACUGGCCU | 18 | AGGCCAGU CUGAUGAGGCCGUUAGGCCGAA AAGGCAGC | 1041 |
| 330 | CUGGCCCU C CUGGAGCA | 19 | UGCUCCAG CUGAUGAGGCCGUUAGGCCGAA AGGGCCAG | 1042 |
| 348 | CUGGACCU C AGCGAUAA | 20 | UUAUCGCU CUGAUGAGGCCGUUAGGCCGAA AGGUCCAG | 1043 |
| 355 | UCAGCGAU A AUGCACAG | 21 | CUGUGCAU CUGAUGAGGCCGUUAGGCCGAA AUCGCUGA | 1044 |
| 366 | GCACAGCU C CGGUCUGU | 22 | ACAGACCG CUGAUGAGGCCGUUAGGCCGAA AGCUGUGC | 1045 |
| 371 | GCUCCGGU C UGUGGACC | 23 | GGUCCACA CUGAUGAGGCCGUUAGGCCGAA ACCGGAGC | 1046 |
| 389 | UGCCACAU U CCACGGCC | 24 | GGCCGUGG CUGAUGAGGCCGUUAGGCCGAA AUGUGGCA | 1047 |
| 390 | GCCACAUU C CACGGCCU | 25 | AGGCCGUG CUGAUGAGGCCGUUAGGCCGAA AAUGUGGC | 1048 |
| 408 | GGCCGCCU A CACACGCU | 26 | AGCGUGUG CUGAUGAGGCCGUUAGGCCGAA AGGCGGCC | 1049 |
| 461 | GGGGCUGU U CCGCGGCC | 27 | GGCCGCGG CUGAUGAGGCCGUUAGGCCGAA ACAGCCCC | 1050 |
| 462 | GGGCUGUU C CGCGGCCU | 28 | AGGCCGCG CUGAUGAGGCCGUUAGGCCGAA AACAGCCC | 1051 |
| 485 | CCUGCAGU A CCUCUACC | 29 | GGUAGAGG CUGAUGAGGCCGUUAGGCCGAA ACUGCAGG | 1052 |
| 489 | CAGUACCU C UACCUGCA | 30 | UGCAGGUA CUGAUGAGGCCGUUAGGCCGAA AGGUACUG | 1053 |
| 491 | GUACCUCU A CCUGCAGG | 31 | CCUGCAGG CUGAUGAGGCCGUUAGGCCGAA AGAGGUAC | 1054 |
| 533 | UGACACCU U CCGCGACC | 32 | GGUCGCGG CUGAUGAGGCCGUUAGGCCGAA AGGUGUCA | 1055 |
| 534 | GACACCUU C CGCGACCU | 33 | AGGUCGCG CUGAUGAGGCCGUUAGGCCGAA AAGGUGUC | 1056 |
| 552 | GGCAACCU C ACACACCU | 34 | AGGUGUGU CUGAUGAGGCCGUUAGGCCGAA AGGUUGCC | 1057 |
| 561 | ACACACCU C UUCCUGCA | 35 | UGCAGGAA CUGAUGAGGCCGUUAGGCCGAA AGGUGUGU | 1058 |
| 563 | ACACCUCU U CCUGCACG | 36 | CGUGCAGG CUGAUGAGGCCGUUAGGCCGAA AGAGGUGU | 1059 |
| 564 | CACCUCUU C CUGCACGG | 37 | CCGUGCAG CUGAUGAGGCCGUUAGGCCGAA AAGAGGUG | 1060 |
| 582 | AACCGCAU C UCCAGCGU | 38 | ACGCUGGA CUGAUGAGGCCGUUAGGCCGAA AUGCGGUU | 1061 |
| 584 | CCGCAUCU C CAGCGUGC | 39 | GCACGCUG CUGAUGAGGCCGUUAGGCCGAA AGAUGCGG | 1062 |
| 605 | GCGCGCCU U CCGUGGGC | 40 | GCCCACGG CUGAUGAGGCCGUUAGGCCGAA AGGCGCGC | 1063 |
| 606 | CGCGCCUU C CGUGGGCU | 41 | AGCCCACG CUGAUGAGGCCGUUAGGCCGAA AAGGCGCG | 1064 |
| 624 | CACAGCCU C GACCGUCU | 42 | AGACGGUC CUGAUGAGGCCGUUAGGCCGAA AGGCUGUG | 1065 |
| 631 | UCGACCGU C UCCUACUG | 43 | CAGUAGGA CUGAUGAGGCCGUUAGGCCGAA ACGGUCGA | 1066 |
| 633 | GACCGUCU C CUACUGCA | 44 | UGCAGUAG CUGAUGAGGCCGUUAGGCCGAA AGACGGUC | 1067 |
| 636 | CGUCUCCU A CUGCACCA | 45 | UGGUGCAG CUGAUGAGGCCGUUAGGCCGAA AGGAGACG | 1068 |
| 677 | GCAUGCCU U CCGUGACC | 46 | GGUCACGG CUGAUGAGGCCGUUAGGCCGAA AGGCAUGC | 1069 |
| 678 | CAUGCCUU C CGUGACCU | 47 | AGGUCACG CUGAUGAGGCCGUUAGGCCGAA AAGGCAUG | 1070 |
| 687 | CGUGACCU U GGCCGCCU | 48 | AGGCGGCC CUGAUGAGGCCGUUAGGCCGAA AGGUCACG | 1071 |
| 696 | GGCCGCCU C AUGACACU | 49 | AGUGUCAU CUGAUGAGGCCGUUAGGCCGAA AGGCGGCC | 1072 |
| 705 | AUGACACU C UAUCUGUU | 50 | AACAGAUA CUGAUGAGGCCGUUAGGCCGAA AGUGUCAU | 1073 |
| 707 | GACACUCU A UCUGUUUG | 51 | CAAACAGA CUGAUGAGGCCGUUAGGCCGAA AGAGUGUC | 1074 |
| 709 | CACUCUAU C UGUUUGCC | 52 | GGCAAACA CUGAUGAGGCCGUUAGGCCGAA AUAGAGUG | 1075 |
| 713 | CUAUCUGU U UGCCAACA | 53 | UGUUGGCA CUGAUGAGGCCGUUAGGCCGAA ACAGAUAG | 1076 |
| 714 | UAUCUGUU U GCCAACAA | 54 | UUGUUGGC CUGAUGAGGCCGUUAGGCCGAA AACAGAUA | 1077 |
| 724 | CCAACAAU C UAUCAGCG | 55 | CGCUGAUA CUGAUGAGGCCGUUAGGCCGAA AUUGUUGG | 1078 |
| 726 | AACAAUCU A UCAGCGCU | 56 | AGCGCUGA CUGAUGAGGCCGUUAGGCCGAA AGAUUGUU | 1079 |
| 728 | CAAUCUAU C AGCGCUGC | 57 | GCAGCGCU CUGAUGAGGCCGUUAGGCCGAA AUAGAUUG | 1080 |
| 773 | CCUGCAGU A CCUGAGGC | 58 | GCCUCAGG CUGAUGAGGCCGUUAGGCCGAA ACUGCAGG | 1081 |
| 783 | CUGAGGCU C AACGACAA | 59 | UUGUCGUU CUGAUGAGGCCGUUAGGCCGAA AGCCUCAG | 1082 |
| 825 | CGCCCACU C UGGGCCUG | 60 | CAGGCCCA CUGAUGAGGCCGUUAGGCCGAA AGUGGGCG | 1083 |
| 845 | GCAGAAGU U CCGCGGCU | 61 | AGCCGCGG CUGAUGAGGCCGUUAGGCCGAA ACUUCUGC | 1084 |
| 846 | CAGAAGUU C CGCGGCUC | 62 | GAGCCGCG CUGAUGAGGCCGUUAGGCCGAA AACUUCUG | 1085 |
| 854 | CCGCGGCU C CUCCUCCG | 63 | CGGAGGAG CUGAUGAGGCCGUUAGGCCGAA AGCCGCGG | 1086 |
| 857 | CGGCUCCU C CUCCGAGG | 64 | CCUCGGAG CUGAUGAGGCCGUUAGGCCGAA AGGAGCCG | 1087 |
| 860 | CUCCUCCU C CGAGGUGC | 65 | GCACCUCG CUGAUGAGGCCGUUAGGCCGAA AGGAGGAG | 1088 |
| 879 | UGCAGCCU C CCGCAACG | 66 | CGUUGCGG CUGAUGAGGCCGUUAGGCCGAA AGGCUGCA | 1089 |
| 906 | CGUGACCU C AAACGCCU | 67 | AGGCGUUU CUGAUGAGGCCGUUAGGCCGAA AGGUCACG | 1090 |
| 915 | AAACGCCU A GCUGCCAA | 68 | UUGGCAGC CUGAUGAGGCCGUUAGGCCGAA AGGCGUUU | 1091 |
| 958 | CCGGCCCU U ACCAUCCC | 69 | GGGAUGGU CUGAUGAGGCCGUUAGGCCGAA AGGGCCGG | 1092 |
| 959 | CGGCCCUU A CCAUCCCA | 70 | UGGGAUGG CUGAUGAGGCCGUUAGGCCGAA AAGGGCCG | 1093 |
| 964 | CUUACCAU C CCAUCUGG | 71 | CCAGAUGG CUGAUGAGGCCGUUAGGCCGAA AUGGUAAG | 1094 |
| 969 | CAUCCCAU C UGGACCGG | 72 | CCGGUCCA CUGAUGAGGCCGUUAGGCCGAA AUGGGAUG | 1095 |
| 1008 | CUGGGGCU U CCCAAGUG | 73 | CACUUGGG CUGAUGAGGCCGUUAGGCCGAA AGCCCCAG | 1096 |
| 1009 | UGGGGCUU C CCAAGUGC | 74 | GCACUUGG CUGAUGAGGCCGUUAGGCCGAA AAGCCCCA | 1097 |
| 1046 | CAAGGCCU C AGUACUGG | 75 | CCAGUACU CUGAUGAGGCCGUUAGGCCGAA AGGCCUUG | 1098 |
| 1050 | GCCUCAGU A CUGGAGCC | 76 | GGCUCCAG CUGAUGAGGCCGUUAGGCCGAA ACUGAGGC | 1099 |
| 1072 | GACCAGCU U CGGCAGGC | 77 | GCCUGCCG CUGAUGAGGCCGUUAGGCCGAA AGCUGGUC | 1100 |
| 1073 | ACCAGCUU C GGCAGGCA | 78 | UGCCUGCC CUGAUGAGGCCGUUAGGCCGAA AAGCUGGU | 1101 |
| 1133 | CAACGGCU C UGGCCCAC | 79 | GUGGGCCA CUGAUGAGGCCGUUAGGCCGAA AGCCGUUG | 1102 |
| 1149 | CGGCACAU C AAUGACUC | 80 | GAGUCAUU CUGAUGAGGCCGUUAGGCCGAA AUGUGCCG | 1103 |
| 1157 | CAAUGACU C ACCCUUUG | 81 | CAAAGGGU CUGAUGAGGCCGUUAGGCCGAA AGUCAUUG | 1104 |
| 1163 | CUCACCCU U UGGGACUC | 82 | GAGUCCCA CUGAUGAGGCCGUUAGGCCGAA AGGGUGAG | 1105 |
| 1164 | UCACCCUU U GGGACUCU | 83 | AGAGUCCC CUGAUGAGGCCGUUAGGCCGAA AAGGGUGA | 1106 |
| 1171 | UUGGGACU C UGCCUGGC | 84 | GCCAGGCA CUGAUGAGGCCGUUAGGCCGAA AGUCCCAA | 1107 |
| 1181 | GCCUGGCU C UGCUGAGC | 85 | GCUCAGCA CUGAUGAGGCCGUUAGGCCGAA AGCCAGGC | 1108 |
| 1197 | CCCCCGCU C ACUGCAGU | 86 | ACUGCAGU CUGAUGAGGCCGUUAGGCCGAA AGCGGGGG | 1109 |
| 1220 | CGAGGGCU C CGAGCCAC | 87 | GUGGCUCG CUGAUGAGGCCGUUAGGCCGAA AGCCCUCG | 1110 |
| 1235 | ACCAGGGU U CCCCACCU | 88 | AGGUGGGG CUGAUGAGGCCGUUAGGCCGAA ACCCUGGU | 1111 |
| 1236 | CCAGGGUU C CCCACCUC | 89 | GAGGUGGG CUGAUGAGGCCGUUAGGCCGAA AACCCUGG | 1112 |
| 1244 | CCCCACCU C GGGCCCUC | 90 | GAGGGCCC CUGAUGAGGCCGUUAGGCCGAA AGGUGGGG | 1113 |
| 1252 | CGGGCCCU C GCCGGAGG | 91 | CCUCCGGC CUGAUGAGGCCGUUAGGCCGAA AGGGCCCG | 1114 |
| 1270 | CAGGCUGU U CACGCAAG | 92 | CUUGCGUG CUGAUGAGGCCGUUAGGCCGAA ACAGCCUG | 1115 |
| 1271 | AGGCUGUU C ACGCAAGA | 93 | UCUUGCGU CUGAUGAGGCCGUUAGGCCGAA AACAGCCU | 1116 |
| 1303 | ACUGCCGU C UGGGCCAG | 94 | CUGGCCCA CUGAUGAGGCCGUUAGGCCGAA ACGGCAGU | 1117 |
| 1343 | UGGUGACU C AGAAGGCU | 95 | AGCCUUCU CUGAUGAGGCCGUUAGGCCGAA AGUCACCA | 1118 |
| 1352 | AGAAGGCU C AGGUGCCC | 96 | GGGCACCU CUGAUGAGGCCGUUAGGCCGAA AGCCUUCU | 1119 |
| 1362 | GGUGCCCU A CCCAGCCU | 97 | AGGCUGGG CUGAUGAGGCCGUUAGGCCGAA AGGGCACC | 1120 |
| 1371 | CCCAGCCU C ACCUGCAG | 98 | CUGCAGGU CUGAUGAGGCCGUUAGGCCGAA AGGCUGGG | 1121 |
| 1383 | UGCAGCCU C ACCCCCCU | 99 | AGGGGGGU CUGAUGAGGCCGUUAGGCCGAA AGGCUGCA | 1122 |
| 1422 | ACAGUGCU U GGGCCCUG | 100 | CAGGGCCC CUGAUGAGGCCGUUAGGCCGAA AGCACUGU | 1123 |

Input Sequence = AB020693.
Cut Site = CH/.
Arm Length = 8.
Core Sequence = CUGAUGAG GCCGUUAGGCCGAA
AB020693 (Homo sapiens mRNA for KIAA0886 protein (Nogo-A); 4053 bp)
Underlined region can be any X sequence or linker, as described herein.

[0182] TABLE IV
Human NOGO Receptor NCH Ribozyme and Substrate Seqeunce

| | | | | Rz |
|---|---|---|---|---|
| | | Seq | | Seq |
| Pos | Substrate | ID | Ribozyme | ID |
| 9 | CCAACCCC U ACGAUGAA | 101 | UUCAUCGU CUGAUGAGGCCGUUAGGCCGAA IGGGUUGG | 1124 |
| 27 | AGGGCGUC C GCUGGAGG | 102 | CCUCCAGC CUGAUGAGGCCGUUAGGCCGAA IACGCCCU | 1125 |
| 30 | GCGUCCGC U GGAGGGAG | 103 | CUCCCUCC CUGAUGAGGCCGUUAGGCCGAA ICGGACGC | 1126 |
| 40 | GAGGGAGC C GGCUGCUG | 104 | CAGCAGCC CUGAUGAGGCCGUUAGGCCGAA ICUCCCUC | 1127 |
| 44 | GAGCCGGC U GCUGGCAU | 105 | AUGCCAGC CUGAUGAGGCCGUUAGGCCGAA ICCGGCUC | 1128 |
| 47 | CCGGCUGC U GGCAUGGG | 106 | CCCAUGCC CUGAUGAGGCCGUUAGGCCGAA ICAGCCGG | 1129 |
| 51 | CUGCUGGC A UGGGUGCU | 107 | AGCACCCA CUGAUGAGGCCGUUAGGCCGAA ICCAGCAG | 1130 |
| 59 | AUGGGUGC U GUGGCUGC | 108 | GCAGCCAC CUGAUGAGGCCGUUAGGCCGAA ICACCCAU | 1131 |
| 65 | GCUGUGGC U GCAGGCCU | 109 | AGGCCUGC CUGAUGAGGCCGUUAGGCCGAA ICCACAGC | 1132 |
| 68 | GUGGCUGC A GGCCUGGC | 110 | GCCAGGCC CUGAUGAGGCCGUUAGGCCGAA ICAGCCAC | 1133 |
| 72 | CUGCAGGC C UGGCAGGU | 111 | ACCUGCCA CUGAUGAGGCCGUUAGGCCGAA ICCUGCAG | 1134 |
| 73 | UGCAGGCC U GGCAGGUG | 112 | CACCUGCC CUGAUGAGGCCGUUAGGCCGAA IGCCUGCA | 1135 |
| 77 | GGCCUGGC A GGUGGCAG | 113 | CUGCCACC CUGAUGAGGCCGUUAGGCCGAA ICCAGGCC | 1136 |
| 84 | CAGGUGGC A GCCCCAUG | 114 | CAUGGGGC CUGAUGAGGCCGUUAGGCCGAA ICCACCUG | 1137 |
| 87 | GUGGCAGC C CCAUGCCC | 115 | GGGCAUGG CUGAUGAGGCCGUUAGGCCGAA ICUGCCAC | 1138 |
| 88 | UGGCAGCC C CAUGCCCA | 116 | UGGGCAUG CUGAUGAGGCCGUUAGGCCGAA IGCUGCCA | 1139 |
| 89 | GGCAGCCC C AUGCCCAG | 117 | CUGGGCAU CUGAUGAGGCCGUUAGGCCGAA IGGCUGCC | 1140 |
| 90 | GCAGCCCC A UGCCCAGG | 118 | CCUGGGCA CUGAUGAGGCCGUUAGGCCGAA IGGGCUGC | 1141 |
| 94 | CCCCAUGC C CAGGUGCC | 119 | GGCACCUG CUGAUGAGGCCGUUAGGCCGAA ICAUGGGG | 1142 |
| 95 | CCCAUGCC C AGGUGCCU | 120 | AGGCACCU CUGAUGAGGCCGUUAGGCCGAA IGCAUGGG | 1143 |
| 96 | CCAUGCCC A GGUGCCUG | 121 | CAGGCACC CUGAUGAGGCCGUUAGGCCGAA IGGCAUGG | 1144 |
| 102 | CCAGGUGC C UGCGUAUG | 122 | CAUACGCA CUGAUGAGGCCGUUAGGCCGAA ICACCUGG | 1145 |
| 103 | CAGGUGCC U GCGUAUGC | 123 | GCAUACGC CUGAUGAGGCCGUUAGGCCGAA IGCACCUG | 1146 |
| 112 | GCGUAUGC U ACAAUGAG | 124 | CUCAUUGU CUGAUGAGGCCGUUAGGCCGAA ICAUACGC | 1147 |
| 115 | UAUGCUAC A AUGAGCCC | 125 | GGGCUCAU CUGAUGAGGCCGUUAGGCCGAA IUAGCAUA | 1148 |
| 122 | CAAUGAGC C CAAGGUGA | 126 | UCACCUUG CUGAUGAGGCCGUUAGGCCGAA ICUCAUUG | 1149 |
| 123 | AAUGAGCC C AAGGUGAC | 127 | GUCACCUU CUGAUGAGGCCGUUAGGCCGAA IGCUCAUU | 1150 |
| 124 | AUGAGCCC A AGGUGACG | 128 | CGUCACCU CUGAUGAGGCCGUUAGGCCGAA IGGCUCAU | 1151 |
| 135 | GUGACGAC A AGCUGCCC | 129 | GGGCAGCU CUGAUGAGGCCGUUAGGCCGAA IUCGUCAC | 1152 |
| 139 | CGACAAGC U GCCCCCAG | 130 | CUGGGGGC CUGAUGAGGCCGUUAGGCCGAA ICUUGUCG | 1153 |
| 142 | CAAGCUGC C CCCAGCAG | 131 | CUGCUGGG CUGAUGAGGCCGUUAGGCCGAA ICAGCUUG | 1154 |
| 143 | AAGCUGCC C CCAGCAGG | 132 | CCUGCUGG CUGAUGAGGCCGUUAGGCCGAA IGCAGCUU | 1155 |
| 144 | AGCUGCCC C CAGCAGGG | 133 | CCCUGCUG CUGAUGAGGCCGUUAGGCCGAA IGGCAGCU | 1156 |
| 145 | GCUGCCCC C AGCAGGGC | 134 | GCCCUGCU CUGAUGAGGCCGUUAGGCCGAA IGGGCAGC | 1157 |
| 146 | CUGCCCCC A GCAGGGCC | 135 | GGCCCUGC CUGAUGAGGCCGUUAGGCCGAA IGGGGCAG | 1158 |
| 149 | CCCCCAGC A GGGCCUGC | 136 | GCAGGCCC CUGAUGAGGCCGUUAGGCCGAA ICUGGGGG | 1159 |
| 154 | AGCAGGGC C UGCAGGCU | 137 | AGCCUGCA CUGAUGAGGCCGUUAGGCCGAA ICCCUGCU | 1160 |
| 155 | GCAGGGCC U GCAGGCUG | 138 | CAGCCUGC CUGAUGAGGCCGUUAGGCCGAA IGCCCUGC | 1161 |
| 158 | GGGCCUGC A GGCUGUGC | 139 | GCACAGCC CUGAUGAGGCCGUUAGGCCGAA ICAGGCCC | 1162 |
| 162 | CUGCAGGC U GUGCCCGU | 140 | ACGGGCAC CUGAUGAGGCCGUUAGGCCGAA ICCUGCAG | 1163 |
| 167 | GGCUGUGC C CGUGGGCA | 141 | UGCCCACG CUGAUGAGGCCGUUAGGCCGAA ICACAGCC | 1164 |
| 168 | GCUGUGCC C GUGGGCAU | 142 | AUGCCCAC CUGAUGAGGCCGUUAGGCCGAA IGCACAGC | 1165 |
| 175 | CCGUGGGC A UCCCUGCU | 143 | AGCAGGGA CUGAUGAGGCCGUUAGGCCGAA ICCCACGG | 1166 |
| 178 | UGGGCAUC C CUGCUGCC | 144 | GGCAGCAG CUGAUGAGGCCGUUAGGCCGAA IAUGCCCA | 1167 |
| 179 | GGGCAUCC C UGCUGCCA | 145 | UGGCAGCA CUGAUGAGGCCGUUAGGCCGAA IGAUGCCC | 1168 |
| 180 | GGCAUCCC U GCUGCCAG | 146 | CUGGCAGC CUGAUGAGGCCGUUAGGCCGAA IGGAUGCC | 1169 |
| 183 | AUCCCUGC U GCCAGCCA | 147 | UGGCUGGC CUGAUGAGGCCGUUAGGCCGAA ICAGGGAU | 1170 |
| 186 | CCUGCUGC C AGCCAGCG | 148 | CGCUGGCU CUGAUGAGGCCGUUAGGCCGAA ICAGCAGG | 1171 |
| 187 | CUGCUGCC A GCCAGCGC | 149 | GCGCUGGC CUGAUGAGGCCGUUAGGCCGAA IGCAGCAG | 1172 |
| 190 | CUGCCAGC C AGCGCAUC | 150 | GAUGCGCU CUGAUGAGGCCGUUAGGCCGAA ICUGGCAG | 1173 |
| 191 | UGCCAGCC A GCGCAUCU | 151 | AGAUGCGC CUGAUGAGGCCGUUAGGCCGAA IGCUGGCA | 1174 |
| 196 | GCCAGCGC A UCUUCCUG | 152 | CAGGAAGA CUGAUGAGGCCGUUAGGCCGAA ICGCUGGC | 1175 |
| 199 | AGCGCAUC U UCCUGCAC | 153 | GUGCAGGA CUGAUGAGGCCGUUAGGCCGAA IAUGCGCU | 1176 |
| 202 | GCAUCUUC C UGCACGGC | 154 | GCCGUGCA CUGAUGAGGCCGUUAGGCCGAA IAAGAUGC | 1177 |
| 203 | CAUCUUCC U GCACGGCA | 155 | UGCCGUGC CUGAUGAGGCCGUUAGGCCGAA ICAAGAUG | 1178 |
| 206 | CUUCCUGC A CGGCAACC | 156 | GGUUGCCG CUGAUGAGGCCGUUAGGCCGAA ICAGGAAG | 1179 |
| 569 | CUUCCUGC A CGGCAACC | 156 | GGUUGCCG CUGAUGAGGCCGUUAGGCCGAA ICAGGAAG | 1180 |
| 211 | UGCACGGC A ACCGCAUC | 157 | GAUGCGGU CUGAUGAGGCCGUUAGGCCGAA ICCGUGCA | 1181 |
| 574 | UGCACGGC A ACCGCAUC | 157 | GAUGCGGU CUGAUGAGGCCGUUAGGCCGAA ICCGUGCA | 1182 |
| 214 | ACGGCAAC C GCAUCUCG | 158 | CGAGAUGC CUGAUGAGGCCGUUAGGCCGAA IUUGCCGU | 1183 |
| 217 | GCAACCGC A UCUCGCAU | 159 | AUGCGAGA CUGAUGAGGCCGUUAGGCCGAA ICGGUUGC | 1184 |
| 220 | ACCGCAUC U CGCAUGUG | 160 | CACAUGCG CUGAUGAGGCCGUUAGGCCGAA IAUGCGGU | 1185 |
| 224 | CAUCUCGC A UGUGCCAG | 161 | CUGGCACA CUGAUGAGGCCGUUAGGCCGAA ICGAGAUG | 1186 |
| 230 | GCAUGUGC C AGCUGCCA | 162 | UGGCAGCU CUGAUGAGGCCGUUAGGCCGAA ICACAUGC | 1187 |
| 231 | CAUGUGCC A GCUGCCAG | 163 | CUGGCAGC CUGAUGAGGCCGUUAGGCCGAA IGCACAUG | 1188 |
| 234 | GUGCCAGC U GCCAGCUU | 164 | AAGCUGGC CUGAUGAGGCCGUUAGGCCGAA ICUGGCAC | 1189 |
| 237 | CCAGCUGC C AGCUUCCG | 165 | CGGAAGCU CUGAUGAGGCCGUUAGGCCGAA ICAGCUGG | 1190 |
| 238 | CAGCUGCC A GCUUCCGU | 166 | ACGGAAGC CUGAUGAGGCCGUUAGGCCGAA IGCAGCUG | 1191 |
| 241 | CUGCCAGC U UCCGUGCC | 167 | GGCACGGA CUGAUGAGGCCGUUAGGCCGAA ICUGGCAG | 1192 |
| 244 | CCAGCUUC C GUGCCUGC | 168 | GCAGGCAC CUGAUGAGGCCGUUAGGCCGAA IAAGCUGG | 1193 |
| 249 | UUCCGUGC C UGCCGCAA | 169 | UUGCGGCA CUGAUGAGGCCGUUAGGCCGAA ICACGGAA | 1194 |
| 250 | UCCGUGCC U GCCGCAAC | 170 | GUUGCGGC CUGAUGAGGCCGUUAGGCCGAA IGCACGGA | 1195 |
| 253 | GUGCCUGC C GCAACCUC | 171 | GAGGUUGC CUGAUGAGGCCGUUAGGCCGAA ICAGGCAC | 1196 |
| 256 | CCUGCCGC A ACCUCACC | 172 | GGUGAGGU CUGAUGAGGCCGUUAGGCCGAA ICGGCAGG | 1197 |
| 259 | GCCGCAAC C UCACCAUC | 173 | GAUGGUGA CUGAUGAGGCCGUUAGGCCGAA IUUGCGGC | 1198 |
| 260 | CCGCAACC U CACCAUCC | 174 | GGAUGGUG CUGAUGAGGCCGUUAGGCCGAA IGUUGCGG | 1199 |
| 262 | GCAACCUC A CCAUCCUG | 175 | CAGGAUGG CUGAUGAGGCCGUUAGGCCGAA IAGGUUGC | 1200 |
| 264 | AACCUCAC C AUCCUGUG | 176 | CACAGGAU CUGAUGAGGCCGUUAGGCCGAA IUGAGGUU | 1201 |
| 265 | ACCUCACC A UCCUGUGG | 177 | CCACAGGA CUGAUGAGGCCGUUAGGCCGAA IGUGAGGU | 1202 |
| 268 | UCACCAUC C UGUGGCUG | 178 | CAGCCACA CUGAUGAGGCCGUUAGGCCGAA IAUGGUGA | 1203 |
| 269 | CACCAUCC U GUGGCUGC | 179 | GCAGCCAC CUGAUGAGGCCGUUAGGCCGAA IGAUGGUG | 1204 |
| 275 | CCUGUGGC U GCACUCGA | 180 | UCGAGUGC CUGAUGAGGCCGUUAGGCCGAA ICCACAGG | 1205 |
| 278 | GUGGCUGC A CUCGAAUG | 121 | CAUUCGAG CUGAUGAGGCCGUUAGGCCGAA ICAGCCAC | 1206 |
| 280 | GGCUGCAC U CGAAUGUG | 182 | CACAUUCG CUGAUGAGGCCGUUAGGCCGAA IUGCAGCC | 1207 |
| 290 | GAAUGUGC U GGCCCGAA | 183 | UUCGGGCC CUGAUGAGGCCGUUAGGCCGAA ICACAUUC | 1208 |
| 294 | GUGCUCGC C CGAAUUGA | 184 | UCAAUUCG CUGAUGAGGCCGUUAGGCCGAA ICCAGCAC | 1209 |
| 295 | UGCUGGCC C GAAUUGAU | 185 | AUCAAUUC CUGAUGAGGCCGUUAGGCCGAA IGCCAGCA | 1210 |
| 309 | GAUGCGGC U GCCUUCAC | 186 | GUGAAGGC CUGAUGAGGCCGUUAGGCCGAA ICCGCAUC | 1211 |
| 312 | GCGGCUGC C UUCACUGG | 187 | CCAGUGAA CUGAUGAGGCCGUUAGGCCGAA ICAGCCGC | 1212 |
| 313 | CGGCUGCC U UCACUGGC | 188 | GCCAGUGA CUGAUGAGGCCGUUAGGCCGAA IGCAGCCG | 1213 |
| 316 | CUGCCUUC A CUGGCCUG | 189 | CAGGCCAG CUGAUGAGGCCGUUAGGCCGAA IAAGGCAG | 1214 |
| 318 | GCCUUCAC U GGCCUGGC | 190 | GCCAGGCC CUGAUGAGGCCGUUAGGCCGAA IUGAAGGC | 1215 |
| 322 | UCACUGGC C UGGCCCUC | 191 | GAGGGCCA CUGAUGAGGCCGUUAGGCCGAA ICCAGUGA | 1216 |
| 323 | CACUGGCC U GGCCCUCC | 192 | GGAGGGCC CUGAUGAGGCCGUUAGGCCGAA IGCCAGUG | 1217 |
| 327 | GGCCUGGC C CUCCUGGA | 193 | UCCAGGAG CUGAUGAGGCCGUUAGGCCGAA ICCAGGCC | 1218 |
| 328 | GCCUGGCC C UCCUGGAG | 194 | CUCCAGGA CUGAUGAGGCCGUUAGGCCGAA IGCCAGGC | 1219 |
| 329 | CCUGGCCC U CCUGGAGC | 195 | GCUCCAGG CUGAUGAGGCCGUUAGGCCGAA IGGCCAGG | 1220 |
| 331 | UGGCCCUC C UGGAGCAG | 196 | CUGCUCCA CUGAUGAGGCCGUUAGGCCGAA IAGGGCCA | 1221 |
| 332 | GGCCCUCC U GGAGCAGC | 197 | GCUGCUCC CUGAUGAGGCCGUUAGGCCGAA IGAGGGCC | 1222 |
| 338 | CCUGGAGC A GCUGGACC | 198 | GGUCCAGC CUGAUGAGGCCGUUAGGCCGAA ICUCCAGG | 1223 |
| 341 | GGAGCAGC U GGACCUCA | 199 | UGAGGUCC CUGAUGAGGCCGUUAGGCCGAA ICUGCUCC | 1224 |
| 346 | AGCUGGAC C UCAGCGAU | 200 | AUCGCUGA CUGAUGAGGCCGUUAGGCCGAA IUCCAGCU | 1225 |
| 347 | GCUGGACC U CAGCGAUA | 201 | UAUCGCUG CUGAUGAGGCCGUUAGGCCGAA IGUCCAGC | 1226 |
| 349 | UGGACCUC A GCGAUAAU | 202 | AUUAUCGC CUGAUGAGGCCGUUAGGCCGAA IAGGUCCA | 1227 |
| 360 | GAUAAUGC A CAGCUCCG | 203 | CGGAGCUG CUGAUGAGGCCGUUAGGCCGAA ICAUUAUC | 1228 |
| 362 | UAAUGCAC A GCUCCGGU | 204 | ACCGGAGC CUGAUGAGGCCGUUAGGCCGAA IUGCAUUA | 1229 |
| 365 | UGCACAGC U CCGGUCUG | 205 | CAGACCGG CUGAUGAGGCCGUUAGGCCGAA ICUGUGCA | 1230 |
| 367 | CACAGCUC C GGUCUGUG | 206 | CACAGACC CUGAUGAGGCCGUUAGGCCGAA IAGCUGUG | 1231 |
| 372 | CUCCGGUC U GUGGACCC | 207 | GGGUCCAC CUGAUGAGGCCGUUAGGCCGAA IACCGGAG | 1232 |
| 379 | CUGUGGAC C CUGCCACA | 208 | UGUGGCAG CUGAUGAGGCCGUUAGGCCGAA IUCCACAG | 1233 |
| 380 | UGUGGACC C UGCCACAU | 209 | AUGUGGCA CUGAUGAGGCCGUUAGGCCGAA IGUCCACA | 1234 |
| 381 | GUGGACCC U GCCACAUU | 210 | AAUGUGGC CUGAUGAGGCCGUUAGGCCGAA IGGUCCAC | 1235 |
| 384 | GACCCUGC C ACAUUCCA | 211 | UGGAAUGU CUGAUGAGGCCGUUAGGCCGAA ICAGGGUC | 1236 |
| 385 | ACCCUGCC A CAUUCCAC | 212 | GUGGAAUG CUGAUGAGGCCGUUAGGCCGAA IGCAGGGU | 1237 |
| 387 | CCUGCCAC A UUCCACGG | 213 | CCGUGGAA CUGAUGAGGCCGUUAGGCCGAA IUGGCAGG | 1238 |
| 391 | CCACAUUC C ACGGCCUG | 214 | CAGGCCGU CUGAUGAGGCCGUUAGGCCGAA IAAUGUGG | 1239 |
| 392 | CACAUUCC A CGGCCUGG | 215 | CCAGGCCG CUGAUGAGGCCGUUAGGCCGAA IGAAUGUG | 1240 |
| 397 | UCCACGGC C UGGGCCGC | 216 | GCGGCCCA CUGAUGAGGCCGUUAGGCCGAA ICCGUGGA | 1241 |
| 398 | CCACGGCC U GGGCCGCC | 217 | GGCGGCCC CUGAUGAGGCCGUUAGGCCGAA IGCCGUGG | 1242 |
| 403 | GCCUGGGC C GCCUACAC | 218 | GUGUAGGC CUGAUGAGGCCGUUAGGCCGAA ICCCAGGC | 1243 |
| 406 | UGGGCCGC C UACACACG | 219 | CGUGUGUA CUGAUGAGGCCGUUAGGCCGAA ICGGCCCA | 1244 |
| 407 | GGGCCGCC U ACACACGC | 220 | GCGUGUGU CUGAUGAGGCCGUUAGGCCGAA IGCGGCCC | 1245 |
| 410 | CCGCCUAC A CACGCUGC | 221 | GCAGCGUG CUGAUGAGGCCGUUAGGCCGAA IUAGGCGG | 1246 |
| 412 | GCCUACAC A CGCUGCAC | 222 | GUGCAGCG CUGAUGAGGCCGUUAGGCCGAA IUGUAGGC | 1247 |
| 416 | ACACACGC U GCACCUGG | 223 | CCAGGUGC CUGAUGAGGCCGUUAGGCCGAA ICGUGUGU | 1248 |
| 419 | CACGCUGC A CCUGGACC | 224 | GGUCCAGG CUGAUGAGGCCGUUAGGCCGAA ICAGCGUG | 1249 |
| 421 | CGCUGCAC C UGGACCGC | 225 | GCGGUCCA CUGAUGAGGCCGUUAGGCCGAA IUGCAGCG | 1250 |
| 422 | GCUGCACC U GGACCGCU | 226 | AGCGGUCC CUGAUGAGGCCGUUAGGCCGAA IGUGCAGC | 1251 |
| 427 | ACCUGGAC C GCUGCGGC | 227 | GCCGCAGC CUGAUGAGGCCGUUAGGCCGAA IUCCAGGU | 1252 |
| 430 | UGGACCGC U GCGGCCUG | 228 | CAGGCCGC CUGAUGAGGCCGUUAGGCCGAA ICGGUCCA | 1253 |
| 436 | GCUGCGGC C UGCAGGAG | 229 | CUCCUGCA CUGAUGAGGCCGUUAGGCCGAA ICCGCAGC | 1254 |
| 437 | CUGCGGCC U GCAGGAGC | 230 | GCUCCUGC CUGAUGAGGCCGUUAGGCCGAA IGCCGCAG | 1255 |
| 440 | CGGCCUGC A GGAGCUGG | 231 | CCAGCUCC CUGAUGAGGCCGUUAGGCCGAA ICAGGCCG | 1256 |
| 446 | GCAGGAGC U GGGCCCGG | 232 | CCGGGCCC CUGAUGAGGCCGUUAGGCCGAA ICUCCUGC | 1257 |
| 451 | AGCUGGGC C CGGGGCUG | 233 | CAGCCCCG CUGAUGAGGCCGUUAGGCCGAA ICCCAGCU | 1258 |
| 452 | GCUGGGCC C GGGGCUGU | 234 | ACAGCCCC CUGAUGAGGCCGUUAGGCCGAA IGCCCAGC | 1259 |
| 458 | CCCGGGGC U GUUCCGCG | 235 | CGCGGAAC CUGAUGAGGCCGUUAGGCCGAA ICCCCGGG | 1260 |
| 463 | GGCUGUUC C GCGGCCUG | 236 | CAGGCCGC CUGAUGAGGCCGUUAGGCCGAA IAACAGCC | 1261 |
| 469 | UCCGCGGC C UGGCUGCC | 237 | GGCAGCCA CUGAUGAGGCCGUUAGGCCGAA ICCGCGGA | 1262 |
| 470 | CCGCGGCC U GGCUGCCC | 238 | GGGCAGCC CUGAUGAGGCCGUUAGGCCGAA IGCCGCGG | 1263 |
| 474 | GGCCUGGC U GCCCUGCA | 239 | UGCAGGGC CUGAUGAGGCCGUUAGGCCGAA ICCAGGCC | 1264 |
| 477 | CUGGCUGC C CUGCAGUA | 240 | UACUGCAG CUGAUGAGGCCGUUAGGCCGAA ICAGCCAG | 1265 |
| 478 | UGGCUGCC C UGCAGUAC | 241 | GUACUGCA CUGAUGAGGCCGUUAGGCCGAA IGCAGCCA | 1266 |
| 479 | GGCUGCCC U GCAGUACC | 242 | GGUACUGC CUGAUGAGGCCGUUAGGCCGAA IGGCAGCC | 1267 |
| 482 | UGCCCUGC A GUACCUCU | 243 | AGAGGUAC CUGAUGAGGCCGUUAGGCCGAA ICAGGGCA | 1268 |
| 487 | UGCAGUAC C UCUACCUG | 244 | CAGGUAGA CUGAUGAGGCCGUUAGGCCGAA IUACUGCA | 1269 |
| 488 | GCAGUACC U CUACCUGC | 245 | GCAGGUAG CUGAUGAGGCCGUUAGGCCGAA IGUACUGC | 1270 |
| 490 | AGUACCUC U ACCUGCAG | 246 | CUGCAGGU CUGAUGAGGCCGUUAGGCCGAA IAGGUACU | 1271 |
| 493 | ACCUCUAC C UGCAGGAC | 247 | GUCCUGCA CUGAUGAGGCCGUUAGGCCGAA IUAGAGGU | 1272 |
| 494 | CCUCUACC U GCAGGACA | 248 | UGUCCUGC CUGAUGAGGCCGUUAGGCCGAA IGUAGAGG | 1273 |
| 497 | CUACCUGC A GGACAACG | 249 | CGUUGUCC CUGAUGAGGCCGUUAGGCCGAA ICAGGUAG | 1274 |
| 502 | UGCAGGAC A ACGCGCUG | 250 | CAGCGCGU CUGAUGAGGCCGUUAGGCCGAA IUCCUGCA | 1275 |
| 509 | CAACGCGC U GCAGGCAC | 251 | GUGCCUGC CUGAUGAGGCCGUUAGGCCGAA ICGCGUUG | 1276 |
| 512 | CGCGCUGC A GGCACUGC | 252 | GCAGUGCC CUGAUGAGGCCGUUAGGCCGAA ICAGCGCG | 1277 |
| 516 | CUGCAGGC A CUGCCUGA | 253 | UCAGGCAG CUGAUGAGGCCGUUAGGCCGAA ICCUGCAG | 1278 |
| 518 | GCAGGCAC U GCCUGAUG | 254 | CAUCAGGC CUGAUGAGGCCGUUAGGCCGAA IUGCCUGC | 1279 |
| 521 | GGCACUGC C UGAUGACA | 255 | UGUCAUCA CUGAUGAGGCCGUUAGGCCGAA ICAGUGCC | 1280 |
| 522 | GCACUGCC U GAUGACAC | 256 | GUGUCAUC CUGAUGAGGCCGUUAGGCCGAA IGCAGUGC | 1281 |
| 529 | CUGAUGAC A CCUUCCGC | 257 | GCGGAAGG CUGAUGAGGCCGUUAGGCCGAA IUCAUCAG | 1282 |
| 531 | GAUGACAC C UUCCGCGA | 258 | UCGCGGAA CUGAUGAGGCCGUUAGGCCGAA IUGUCAUC | 1283 |
| 532 | AUGACACC U UCCGCGAC | 259 | GUCGCGGA CUGAUGAGGCCGUUAGGCCGAA IGUGUCAU | 1284 |
| 535 | ACACCUUC C GCGACCUG | 260 | CAGGUCGC CUGAUGAGGCCGUUAGGCCGAA IAAGGUGU | 1285 |
| 541 | UCCGCGAC C UGGGCAAC | 261 | GUUGCCCA CUGAUGAGGCCGUUAGGCCGAA IUCGCGGA | 1286 |
| 542 | CCGCGACC U GGGCAACC | 262 | GGUUGCCC CUGAUGAGGCCGUUAGGCCGAA IGUCGCGG | 1287 |
| 547 | ACCUGGGC A ACCUCACA | 263 | UGUGAGGU CUGAUGAGGCCGUUAGGCCGAA ICCCAGGU | 1288 |
| 550 | UGGGCAAC C UCACACAC | 264 | GUGUGUGA CUGAUGAGGCCGUUAGGCCGAA IUUGCCCA | 1289 |
| 551 | GGGCAACC U CACACACC | 265 | GGUGUGUG CUGAUGAGGCCGUUAGGCCGAA IGUUGCCC | 1290 |
| 553 | GCAACCUC A CACACCUC | 266 | GAGGUGUG CUGAUGAGGCCGUUAGGCCGAA IAGGUUGC | 1291 |
| 555 | AACCUCAC A CACCUCUU | 267 | AAGAGGUG CUGAUGAGGCCGUUAGGCCGAA IUGAGGUU | 1292 |
| 557 | CCUCACAC A CCUCUUCC | 268 | GGAAGAGG CUGAUGAGGCCGUUAGGCCGAA IUGUGAGG | 1293 |
| 559 | UCACACAC C UCUUCCUG | 269 | CAGGAAGA CUGAUGAGGCCGUUAGGCCGAA IUGUGUGA | 1294 |
| 560 | CACACACC U CUUCCUGC | 270 | GCAGGAAG CUGAUGAGGCCGUUAGGCCGAA IGUGUGUG | 1295 |
| 562 | CACACCUC U UCCUGCAC | 271 | GUGCAGGA CUGAUGAGGCCGUUAGGCCGAA IAGGUGUG | 1296 |
| 565 | ACCUCUUC C UGCACGGC | 272 | GCCGUGCA CUGAUGAGGCCGUUAGGCCGAA IAAGAGGU | 1297 |
| 566 | CCUCUUCC U GCACGGCA | 273 | UGCCGUGC CUGAUGAGGCCGUUAGGCCGAA IGAAGAGG | 1298 |
| 577 | ACGGCAAC C GCAUCUCC | 274 | GGAGAUGC CUGAUGAGGCCGUUAGGCCGAA IUUGCCGU | 1299 |
| 580 | GCAACCGC A UCUCCAGC | 275 | GCUGGAGA CUGAUGAGGCCGUUAGGCCGAA ICGGUUGC | 1300 |
| 583 | ACCGCAUC U CCAGCGUG | 276 | CACGCUGG CUGAUGAGGCCGUUAGGCCGAA IAUGCGGU | 1301 |
| 585 | CGCAUCUC C AGCGUGCC | 277 | GGCACGCU CUGAUGAGGCCGUUAGGCCGAA IAGAUGCG | 1302 |
| 586 | GCAUCUCC A GCGUGCCC | 278 | GGGCACGC CUGAUGAGGCCGUUAGGCCGAA IGAGAUGC | 1303 |
| 593 | CAGCGUGC C CGAGCGCG | 279 | CGCGCUCG CUGAUGAGGCCGUUAGGCCGAA ICACGCUG | 1304 |
| 594 | AGCGUGCC C GAGCGCGC | 280 | GCGCGCUC CUGAUGAGGCCGUUAGGCCGAA IGCACGCU | 1305 |
| 603 | GAGCGCGC C UUCCGUGG | 281 | CCACGGAA CUGAUGAGGCCGUUAGGCCGAA ICGCGCUC | 1306 |
| 604 | AGCGCGCC U UCCGUGGG | 282 | CCCACGGA CUGAUGAGGCCGUUAGGCCGAA IGCGCGCU | 1307 |
| 607 | GCGCCUUC C GUGGGCUG | 283 | CAGCCCAC CUGAUGAGGCCGUUAGGCCGAA IAAGGCGC | 1308 |
| 614 | CCGUGGGC U GCACAGCC | 284 | GGCUGUGC CUGAUGAGGCCGUUAGGCCGAA ICCCACGG | 1309 |
| 617 | UGGGCUGC A CAGCCUCG | 285 | CGAGGCUG CUGAUGAGGCCGUUAGGCCGAA ICAGCCCA | 1310 |
| 619 | GGCUGCAC A GCCUCGAC | 286 | GUCGAGGC CUGAUGAGGCCGUUAGGCCGAA IUGCAGCC | 1311 |
| 622 | UGCACAGC C UCGACCGU | 287 | ACGGUCGA CUGAUGAGGCCGUUAGGCCGAA ICUGUGCA | 1312 |
| 623 | GCACAGCC U CGACCGUC | 288 | GACGGUCG CUGAUGAGGCCGUUAGGCCGAA IGCUGUGC | 1313 |
| 628 | GCCUCGAC C GUCUCCUA | 289 | UAGGAGAC CUGAUGAGGCCGUUAGGCCGAA IUCGAGGC | 1314 |
| 632 | CGACCGUC U CCUACUGC | 290 | GCAGUAGG CUGAUGAGGCCGUUAGGCCGAA IACGGUCG | 1315 |
| 634 | ACCGUCUC C UACUGCAC | 291 | GUGCAGUA CUGAUGAGGCCGUUAGGCCGAA IAGACGGU | 1316 |
| 635 | CCGUCUCC U ACUGCACC | 292 | GGUGCAGU CUGAUGAGGCCGUUAGGCCGAA IGAGACGG | 1317 |
| 638 | UCUCCUAC U GCACCAGA | 293 | UCUGGUGC CUGAUGAGGCCGUUAGGCCGAA IUAGGAGA | 1318 |
| 641 | CCUACUGC A CCAGAACC | 294 | GGUUCUGG CUGAUGAGGCCGUUAGGCCGAA ICAGUAGG | 1319 |
| 643 | UACUGCAC C AGAACCGC | 295 | GCGGUUCU CUGAUGAGGCCGUUAGGCCGAA IUGCAGUA | 1320 |
| 644 | ACUGCACC A GAACCGCG | 296 | CGCGGUUC CUGAUGAGGCCGUUAGGCCGAA IGUGCAGU | 1321 |
| 649 | ACCAGAAC C GCGUGGCC | 297 | GGCCACGC CUGAUGAGGCCGUUAGGCCGAA IUUCUGGU | 1322 |
| 657 | CGCGUGGC C CAUGUGCA | 298 | UGCACAUG CUGAUGAGGCCGUUAGGCCGAA ICCACGCG | 1323 |
| 658 | GCGUGGCC C AUGUGCAC | 299 | GUGCACAU CUGAUGAGGCCGUUAGGCCGAA IGCCACGC | 1324 |
| 659 | CGUGGCCC A UGUGCACC | 300 | GGUGCACA CUGAUGAGGCCGUUAGGCCGAA IGGCCACG | 1325 |
| 665 | CCAUGUGC A CCCGCAUG | 301 | CAUGCGGG CUGAUGAGGCCGUUAGGCCGAA ICACAUGG | 1326 |
| 667 | AUGUGCAC C CGCAUGCC | 302 | GGCAUGCG CUGAUGAGGCCGUUAGGCCGAA IUGCACAU | 1327 |
| 668 | UGUGCACC C GCAUGCCU | 303 | AGGCAUGC CUGAUGAGGCCGUUAGGCCGAA IGUGCACA | 1328 |
| 671 | GCACCCGC A UGCCUUCC | 304 | GGAAGGCA CUGAUGAGGCCGUUAGGCCGAA ICGGGUGC | 1329 |
| 675 | CCGCAUGC C UUCCGUGA | 305 | UCACGGAA CUGAUGAGGCCGUUAGGCCGAA ICAUGCGG | 1330 |
| 676 | CGCAUGCC U UCCGUGAC | 306 | GUCACGGA CUGAUGAGGCCGUUAGGCCGAA IGCAUGCG | 1331 |
| 679 | AUGCCUUC C GUGACCUU | 307 | AAGGUCAC CUGAUGAGGCCGUUAGGCCGAA IAAGGCAU | 1332 |
| 685 | UCCGUGAC C UUGGCCGC | 308 | GCGGCCAA CUGAUGAGGCCGUUAGGCCGAA IUCACGGA | 1333 |
| 686 | CCGUGACC U UGGCCGCC | 309 | GGCGGCCA CUGAUGAGGCCGUUAGGCCGAA IGUCACGG | 1334 |
| 691 | ACCUUGGC C GCCUCAUG | 310 | CAUGAGGC CUGAUGAGGCCGUUAGGCCGAA ICCAAGGU | 1335 |
| 694 | UUGGCCGC C UCAUGACA | 311 | UGUCAUGA CUGAUGAGGCCGUUAGGCCGAA ICGGCCAA | 1336 |
| 695 | UGGCCGCC U CAUGACAC | 312 | GUGUCAUG CUGAUGAGGCCGUUAGGCCGAA IGCGGCCA | 1337 |
| 697 | GCCGCCUC A UGACACUC | 313 | GAGUGUCA CUGAUGAGGCCGUUAGGCCGAA IAGGCGGC | 1338 |
| 702 | CUCAUGAC A CUCUAUCU | 314 | AGAUAGAG CUGAUGAGGCCGUUAGGCCGAA IUCAUGAG | 1339 |
| 704 | CAUGACAC U CUAUCUGU | 315 | ACAGAUAG CUGAUGAGGCCGUUAGGCCGAA IUGUCAUG | 1340 |
| 706 | UGACACUC U AUCUGUUU | 316 | AAACAGAU CUGAUGAGGCCGUUAGGCCGAA IAGUGUCA | 1341 |
| 710 | ACUCUAUC U GUUUGCCA | 317 | UGGCAAAC CUGAUGAGGCCGUUAGGCCGAA IAUAGAGU | 1342 |
| 717 | CUGUUUGC C AACAAUCU | 318 | AGAUUGUU CUGAUGAGGCCGUUAGGCCGAA ICAAACAG | 1343 |
| 718 | UGUUUGCC A ACAAUCUA | 319 | UAGAUUGU CUGAUGAGGCCGUUAGGCCGAA IGCAAACA | 1344 |
| 721 | UUGCCAAC A AUCUAUCA | 320 | UGAUAGAU CUGAUGAGGCCGUUAGGCCGAA IUUGGCAA | 1345 |
| 725 | CAACAAUC U AUCAGCGC | 321 | GCGCUGAU CUGAUGAGGCCGUUAGGCCGAA IAUUGUUG | 1346 |
| 729 | AAUCUAUC A GCGCUGCC | 322 | GGCAGCGC CUGAUGAGGCCGUUAGGCCGAA IAUAGAUU | 1347 |
| 734 | AUCAGCGC U GCCCACUG | 323 | CAGUGGGC CUGAUGAGGCCGUUAGGCCGAA ICGCUGAU | 1348 |
| 737 | AGCGCUGC C CACUGAGG | 324 | CCUCAGUG CUGAUGAGGCCGUUAGGCCGAA ICAGCGCU | 1349 |
| 738 | GCGCUGCC C ACUGAGGC | 325 | GCCUCAGU CUGAUGAGGCCGUUAGGCCGAA IGCAGCGC | 1350 |
| 739 | CGCUGCCC A CUGAGGCC | 326 | GGCCUCAG CUGAUGAGGCCGUUAGGCCGAA IGGCAGCG | 1351 |
| 741 | CUGCCCAC U GAGGCCCU | 327 | AGGGCCUC CUGAUGAGGCCGUUAGGCCGAA IUGGGCAG | 1352 |
| 747 | ACUGAGGC C CUGGCCCC | 328 | GGGGCCAG CUGAUGAGGCCGUUAGGCCGAA ICCUCAGU | 1353 |
| 748 | CUGAGGCC C UGGCCCCC | 329 | GGGGGCCA CUGAUGAGGCCGUUAGGCCGAA IGCCUCAG | 1354 |
| 749 | UGAGGCCC U GGCCCCCC | 330 | GGGGGGCC CUGAUGAGGCCGUUAGGCCGAA IGGCCUCA | 1355 |
| 753 | GCCCUGGC C CCCCUGCG | 331 | CGCAGGGG CUGAUGAGGCCGUUAGGCCGAA ICCAGGGC | 1356 |
| 754 | CCCUGGCC C CCCUGCGU | 332 | ACGCAGGG CUGAUGAGGCCGUUAGGCCGAA IGCCAGGG | 1357 |
| 755 | CCUGGCCC C CCUGCGUG | 333 | CACGCAGG CUGAUGAGGCCGUUAGGCCGAA IGGCCAGG | 1358 |
| 756 | CUGGCCCC C CUGCGUGC | 334 | GCACGCAG CUGAUGAGGCCGUUAGGCCGAA IGGGCCAG | 1359 |
| 757 | UGGCCCCC C UGCGUGCC | 335 | GGCACGCA CUGAUGAGGCCGUUAGGCCGAA IGGGGCCA | 1360 |
| 758 | GGCCCCCC U GCGUGCCC | 336 | GGGCACGC CUGAUGAGGCCGUUAGGCCGAA IGGGGGCC | 1361 |
| 765 | CUGCGUGC C CUGCAGUA | 337 | UACUGCAG CUGAUGAGGCCGUUAGGCCGAA ICACGCAG | 1362 |
| 766 | UGCGUGCC C UGCAGUAC | 338 | GUACUGCA CUGAUGAGGCCGUUAGGCCGAA IGCACGCA | 1363 |
| 767 | GCGUGCCC U GCAGUACC | 339 | GGUACUGC CUGAUGAGGCCGUUAGGCCGAA IGGCACGC | 1364 |
| 770 | UGCCCUGC A GUACCUGA | 340 | UCAGGUAC CUGAUGAGGCCGUUAGGCCGAA ICAGGGCA | 1365 |
| 775 | UGCAGUAC C UGAGGCUC | 341 | GAGCCUCA CUGAUGAGGCCGUUAGGCCGAA IUACUGCA | 1366 |
| 776 | GCAGUACC U GAGGCUCA | 342 | UGAGCCUC CUGAUGAGGCCGUUAGGCCGAA IGUACUGC | 1367 |
| 782 | CCUGAGGC U CAACGACA | 343 | UGUCGUUG CUGAUGAGGCCGUUAGGCCGAA ICCUCAGG | 1368 |
| 784 | UGAGGCUC A ACGACAAC | 344 | GUUGUCGU CUGAUGAGGCCGUUAGGCCGAA IAGCCUCA | 1369 |
| 790 | UCAACGAC A ACCCCUGG | 345 | CCAGGGGU CUGAUGAGGCCGUUAGGCCGAA IUCGUUGA | 1370 |
| 793 | ACGACAAC C CCUGGGUG | 346 | CACCCAGG CUGAUGAGGCCGUUAGGCCGAA IUUGUCGU | 1371 |
| 794 | CGACAACC C CUGGGUGU | 347 | ACACCCAG CUGAUGAGGCCGUUAGGCCGAA IGUUGUCG | 1372 |
| 795 | GACAACCC C UGGGUGUG | 348 | CACACCCA CUGAUGAGGCCGUUAGGCCGAA IGGUUGUC | 1373 |
| 796 | ACAACCCC U GGGUGUGU | 349 | ACACACCC CUGAUGAGGCCGUUAGGCCGAA IGGGUUGU | 1374 |
| 808 | UGUGUGAC U GCCGGGCA | 350 | UGCCCGGC CUGAUGAGGCCGUUAGGCCGAA IUCACACA | 1375 |
| 811 | GUGACUGC C GGGCACGC | 351 | GCGUGCCC CUGAUGAGGCCGUUAGGCCGAA ICAGUCAC | 1376 |
| 816 | UGCCGGGC A CGCCCACU | 352 | AGUGGGCG CUGAUGAGGCCGUUAGGCCGAA ICCCGGCA | 1377 |
| 820 | GGGCACGC C CACUCUGG | 353 | CCAGAGUG CUGAUGAGGCCGUUAGGCCGAA ICGUGCCC | 1378 |
| 821 | GGCACGCC C ACUCUGGG | 354 | CCCAGAGU CUGAUGAGGCCGUUAGGCCGAA IGCGUGCC | 1379 |
| 822 | GCACGCCC A CUCUGGGC | 355 | GCCCAGAG CUGAUGAGGCCGUUAGGCCGAA IGGCGUGC | 1380 |
| 824 | ACGCCCAC U CUGGGCCU | 356 | AGGCCCAG CUGAUGAGGCCGUUAGGCCGAA IUGGGCGU | 1381 |
| 826 | GCCCACUC U GGGCCUGG | 357 | CCAGGCCC CUGAUGAGGCCGUUAGGCCGAA IAGUGGGC | 1382 |
| 831 | CUCUGGGC C UGGCUGCA | 358 | UGCAGCCA CUGAUGAGGCCGUUAGGCCGAA ICCCAGAG | 1383 |
| 832 | UCUGGGCC U GGCUGCAG | 359 | CUGCAGCC CUGAUGAGGCCGUUAGGCCGAA IGCCCAGA | 1384 |
| 836 | GGCCUGGC U GCAGAAGU | 360 | ACUUCUGC CUGAUGAGGCCGUUAGGCCGAA ICCAGGCC | 1385 |
| 839 | CUGGCUGC A GAAGUUCC | 361 | GGAACUUC CUGAUGAGGCCGUUAGGCCGAA ICAGCCAG | 1386 |
| 847 | AGAAGUUC C GCGGCUCC | 362 | GGAGCCGC CUGAUGAGGCCGUUAGGCCGAA IAACUUCU | 1387 |
| 853 | UCCGCGGC U CCUCCUCC | 363 | GGAGGAGG CUGAUGAGGCCGUUAGGCCGAA ICCGCGGA | 1388 |
| 855 | CGCGGCUC C UCCUCCGA | 364 | UCGGAGGA CUGAUGAGGCCGUUAGGCCGAA IAGCCGCG | 1389 |
| 856 | GCGGCUCC U CCUCCGAG | 365 | CUCGGAGG CUGAUGAGGCCGUUAGGCCGAA IGAGCCGC | 1390 |
| 858 | GGCUCCUC C UCCGAGGU | 366 | ACCUCGGA CUGAUGAGGCCGUUAGGCCGAA IAGGAGCC | 1391 |
| 859 | GCUCCUCC U CCGAGGUG | 367 | CACCUCGG CUGAUGAGGCCGUUAGGCCGAA IGAGGAGC | 1392 |
| 861 | UCCUCCUC C GAGGUGCC | 368 | GGCACCUC CUGAUGAGGCCGUUAGGCCGAA IAGGAGGA | 1393 |
| 869 | CGAGGUGC C CUGCAGCC | 369 | GGCUGCAG CUGAUGAGGCCGUUAGGCCGAA ICACCUCG | 1394 |
| 870 | GAGGUGCC C UGCAGCCU | 370 | AGGCUGCA CUGAUGAGGCCGUUAGGCCGAA IGCACCUC | 1395 |
| 871 | AGGUGCCC U GCAGCCUC | 371 | GAGGCUGC CUGAUGAGGCCGUUAGGCCGAA IGGCACCU | 1396 |
| 874 | UGCCCUGC A GCCUCCCG | 372 | CGGGAGGC CUGAUGAGGCCGUUAGGCCGAA ICAGGGCA | 1397 |
| 877 | CCUGCAGC C UCCCGCAA | 373 | UUGCGGGA CUGAUGAGGCCGUUAGGCCGAA ICUGCAGG | 1398 |
| 878 | CUGCAGCC U CCCGCAAC | 374 | GUUGCGGG CUGAUGAGGCCGUUAGGCCGAA IGCUGCAG | 1399 |
| 880 | GCAGCCUC C CGCAACGC | 375 | GCGUUGCG CUGAUGAGGCCGUUAGGCCGAA IAGGCUGC | 1400 |
| 881 | CAGCCUCC C GCAACGCC | 376 | GGCGUUGC CUGAUGAGGCCGUUAGGCCGAA IGAGGCUG | 1401 |
| 884 | CCUCCCGC A ACGCCUGG | 377 | CCAGGCGU CUGAUGAGGCCGUUAGGCCGAA ICGGGAGG | 1402 |
| 889 | CGCAACGC C UGGCUGGC | 378 | GCCAGCCA CUGAUGAGGCCGUUAGGCCGAA ICGUUGCG | 1403 |
| 890 | GCAACGCC U GGCUGGCC | 379 | GGCCAGCC CUGAUGAGGCCGUUAGGCCGAA IGCGUUGC | 1404 |
| 894 | CGCCUGGC U GGCCGUGA | 380 | UCACGGCC CUGAUGAGGCCGUUAGGCCGAA ICCAGGCG | 1405 |
| 898 | UGGCUGGC C GUGACCUC | 381 | GAGGUCAC CUGAUGAGGCCGUUAGGCCGAA ICCAGCCA | 1406 |
| 904 | GCCGUGAC C UCAAACGC | 382 | GCGUUUGA CUGAUGAGGCCGUUAGGCCGAA IUCACGGC | 1407 |
| 905 | CCGUGACC U CAAACGCC | 383 | GGCGUUUG CUGAUGAGGCCGUUAGGCCGAA IGUCACGG | 1408 |
| 907 | GUGACCUC A AACGCCUA | 384 | UAGGCGUU CUGAUGAGGCCGUUAGGCCGAA IAGGUCAC | 1409 |
| 913 | UCAAACGC C UAGCUGCC | 385 | GGCAGCUA CUGAUGAGGCCGUUAGGCCGAA ICGUUUGA | 1410 |
| 914 | CAAACGCC U AGCUGCCA | 386 | UGGCAGCU CUGAUGAGGCCGUUAGGCCGAA IGCGUUUG | 1411 |
| 918 | CGCCUAGC U GCCAAUGA | 387 | UCAUUGGC CUGAUGAGGCCGUUAGGCCGAA ICUAGGCG | 1412 |
| 921 | CUAGCUGC C AAUGACCU | 388 | AGGUCAUU CUGAUGAGGCCGUUAGGCCGAA ICAGCUAG | 1413 |
| 922 | UAGCUGCC A AUGACCUG | 389 | CAGGUCAU CUGAUGAGGCCGUUAGGCCGAA IGCAGCUA | 1414 |
| 928 | CCAAUGAC C UGCAGGGC | 390 | GCCCUGCA CUGAUGAGGCCGUUAGGCCGAA IUCAUUGG | 1415 |
| 929 | CAAUGACC U GCAGGGCU | 391 | AGCCCUGC CUGAUGAGGCCGUUAGGCCGAA IGUCAUUG | 1416 |
| 932 | UGACCUGC A GGGCUGCG | 392 | CGCAGCCC CUGAUGAGGCCGUUAGGCCGAA ICAGGUCA | 1417 |
| 937 | UGCAGGGC U GCGCUGUG | 393 | CACAGCGC CUGAUGAGGCCGUUAGGCCGAA ICCCUGCA | 1418 |
| 942 | GGCUGCGC U GUGGCCAC | 394 | GUGGCCAC CUGAUGAGGCCGUUAGGCCGAA ICGCAGCC | 1419 |
| 948 | GCUGUGGC C ACCGGCCC | 395 | GGGCCGGU CUGAUGAGGCCGUUAGGCCGAA ICCACAGC | 1420 |
| 949 | CUGUGGCC A CCGGCCCU | 396 | AGGGCCGG CUGAUGAGGCCGUUAGGCCGAA IGCCACAG | 1421 |
| 951 | GUGGCCAC C GGCCCUUA | 397 | UAAGGGCC CUGAUGAGGCCGUUAGGCCGAA IUGGCCAC | 1422 |
| 955 | CCACCGGC C CUUACCAU | 398 | AUGGUAAG CUGAUGAGGCCGUUAGGCCGAA ICCGGUGG | 1423 |
| 956 | CACCGGCC C UUACCAUC | 399 | GAUGGUAA CUGAUGAGGCCGUUAGGCCGAA IGCCGGUG | 1424 |
| 957 | ACCGGCCC U UACCAUCC | 400 | GGAUGGUA CUGAUGAGGCCGUUAGGCCGAA IGGCCGGU | 1425 |
| 961 | GCCCUUAC C AUCCCAUC | 401 | GAUGGGAU CUGAUGAGGCCGUUAGGCCGAA IUAAGGGC | 1426 |
| 962 | CCCUUACC A UCCCAUCU | 402 | AGAUGGGA CUGAUGAGGCCGUUAGGCCGAA IGUAAGGG | 1427 |
| 965 | UUACCAUC C CAUCUGGA | 403 | UCCAGAUG CUGAUGAGGCCGUUAGGCCGAA IAUGGUAA | 1428 |
| 966 | UACCAUCC C AUCUGGAC | 404 | GUCCAGAU CUGAUGAGGCCGUUAGGCCGAA IGAUGGUA | 1429 |
| 967 | ACCAUCCC A UCUGGACC | 405 | GGUCCAGA CUGAUGAGGCCGUUAGGCCGAA IGGAUGGU | 1430 |
| 970 | AUCCCAUC U GGACCGGC | 406 | GCCGGUCC CUGAUGAGGCCGUUAGGCCGAA IAUGGGAU | 1431 |
| 975 | AUCUGGAC C GGCAGGGC | 407 | GCCCUGCC CUGAUGAGGCCGUUAGGCCGAA IUCCAGAU | 1432 |
| 979 | GGACCGGC A GGGCCACC | 408 | GGUGGCCC CUGAUGAGGCCGUUAGGCCGAA ICCGGUCC | 1433 |
| 984 | GGCAGGGC C ACCGAUGA | 409 | UCAUCGGU CUGAUGAGGCCGUUAGGCCGAA ICCCUGCC | 1434 |
| 985 | GCAGGGCC A CCGAUGAG | 410 | CUCAUCGG CUGAUGAGGCCGUUAGGCCGAA IGCCCUGC | 1435 |
| 987 | AGGGCCAC C GAUGAGGA | 411 | UCCUCAUC CUGAUGAGGCCGUUAGGCCGAA IUGGCCCU | 1436 |
| 998 | UGAGGAGC C GCUGGGGC | 412 | GCCCCAGC CUGAUGAGGCCGUUAGGCCGAA ICUCCUCA | 1437 |
| 1001 | GGAGCCGC U GGGGCUUC | 413 | GAAGCCCC CUGAUGAGGCCGUUAGGCCGAA ICGGCUCC | 1438 |
| 1007 | GCUGGGGC U UCCCAAGU | 414 | ACUUGGGA CUGAUGAGGCCGUUAGGCCGAA ICCCCAGC | 1439 |
| 1010 | GGGGCUUC C CAAGUGCU | 415 | AGCACUUG CUGAUGAGGCCGUUAGGCCGAA IAAGCCCC | 1440 |
| 1011 | GGGCUUCC C AAGUGCUG | 416 | CAGCACUU CUGAUGAGGCCGUUAGGCCGAA IGAAGCCC | 1441 |
| 1012 | GGCUUCCC A AGUGCUGC | 417 | GCAGCACU CUGAUGAGGCCGUUAGGCCGAA IGGAAGCC | 1442 |
| 1018 | CCAAGUGC U GCCAGCCA | 418 | UGGCUGGC CUGAUGAGGCCGUUAGGCCGAA ICACUUGG | 1443 |
| 1021 | AGUGCUGC C AGCCAGAU | 419 | AUCUGGCU CUGAUGAGGCCGUUAGGCCGAA ICAGCACU | 1444 |
| 1022 | GUGCUGCC A GCCAGAUG | 420 | CAUCUGGC CUGAUGAGGCCGUUAGGCCGAA IGCAGCAC | 1445 |
| 1025 | CUGCCAGC C AGAUGCCG | 421 | CGGCAUCU CUGAUGAGGCCGUUAGGCCGAA ICUGGCAG | 1446 |
| 1026 | UGCCAGCC A GAUGCCGC | 422 | GCGGCAUC CUGAUGAGGCCGUUAGGCCGAA IGCUGGCA | 1447 |
| 1032 | CCAGAUGC C GCUGACAA | 423 | UUGUCAGC CUGAUGAGGCCGUUAGGCCGAA ICAUCUGG | 1448 |
| 1035 | GAUGCCGC U GACAAGGC | 424 | GCCUUGUC CUGAUGAGGCCGUUAGGCCGAA ICGGCAUC | 1449 |
| 1039 | CCGCUGAC A AGGCCUCA | 425 | UGAGGCCU CUGAUGAGGCCGUUAGGCCGAA IUCAGCGG | 1450 |
| 1044 | GACAAGGC C UCAGUACU | 426 | AGUACUGA CUGAUGAGGCCGUUAGGCCGAA ICCUUGUC | 1451 |
| 1045 | ACAAGGCC U CAGUACUG | 427 | CAGUACUG CUGAUGAGGCCGUUAGGCCGAA IGCCUUGU | 1452 |
| 1047 | AAGGCCUC A GUACUGGA | 428 | UCCAGUAC CUGAUGAGGCCGUUAGGCCGAA IAGGCCUU | 1453 |
| 1052 | CUCAGUAC U GGAGCCUG | 429 | CAGGCUCC CUGAUGAGGCCGUUAGGCCGAA IUACUGAG | 1454 |
| 1058 | ACUGGAGC C UGGAAGAC | 430 | GUCUUCCA CUGAUGAGGCCGUUAGGCCGAA ICUCCAGU | 1455 |
| 1059 | CUGGAGCC U GGAAGACC | 431 | GGUCUUCC CUGAUGAGGCCGUUAGGCCGAA IGCUCCAG | 1456 |
| 1067 | UGGAAGAC C AGCUUCGG | 432 | CCGAAGCU CUGAUGAGGCCGUUAGGCCGAA IUCUUCCA | 1457 |
| 1068 | GGAAGACC A GCUUCGGC | 433 | GCCGAAGC CUGAUGAGGCCGUUAGGCCGAA IGUCUUCC | 1458 |
| 1071 | AGACCAGC U UCGGCAGG | 434 | CCUGCCGA CUGAUGAGGCCGUUAGGCCGAA ICUGGUCU | 1459 |
| 1077 | GCUUCGGC A GGCAAUGC | 435 | GCAUUGCC CUGAUGAGGCCGUUAGGCCGAA ICCGAAGC | 1460 |
| 1081 | CGGCAGGC A AUGCGCUG | 436 | CAGCGCAU CUGAUGAGGCCGUUAGGCCGAA ICCUGCCG | 1461 |
| 1088 | CAAUGCGC U GAAGGGAC | 437 | GUCCCUUC CUGAUGAGGCCGUUAGGCCGAA ICGCAUUG | 1462 |
| 1103 | ACGCGUGC C GCCCGGUG | 438 | CACCGGGC CUGAUGAGGCCGUUAGGCCGAA ICACGCGU | 1463 |
| 1106 | CGUGCCGC C CGGUGACA | 439 | UGUCACCG CUGAUGAGGCCGUUAGGCCGAA ICGGCACG | 1464 |
| 1107 | GUGCCGCC C GGUGACAG | 440 | CUGUCACC CUGAUGAGGCCGUUAGGCCGAA IGCGGCAC | 1465 |
| 1114 | CCGGUGAC A GCCCGCCG | 441 | CGGCGGGC CUGAUGAGGCCGUUAGGCCGAA IUCACCGG | 1466 |
| 1117 | GUGACAGC C CGCCGGGC | 442 | GCCCGGCG CUGAUGAGGCCGUUAGGCCGAA ICUGUCAC | 1467 |
| 1118 | UGACAGCC C GCCGGGCA | 443 | UGCCCGGC CUGAUGAGGCCGUUAGGCCGAA IGCUGUCA | 1468 |
| 1121 | CAGCCCGC C GGGCAACG | 444 | CGUUGCCC CUGAUGAGGCCGUUAGGCCGAA ICGGGCUG | 1469 |
| 1126 | CGCCGGGC A ACGGCUCU | 445 | AGAGCCGU CUGAUGAGGCCGUUAGGCCGAA ICCCGGCG | 1470 |
| 1132 | GCAACGGC U CUGGCCCA | 446 | UGGGCCAG CUGAUGAGGCCGUUAGGCCGAA ICCGUUGC | 1471 |
| 1134 | AACGGCUC U GGCCCACG | 447 | CGUGGGCC CUGAUGAGGCCGUUAGGCCGAA IAGCCGUU | 1472 |
| 1138 | GCUCUGGC C CACGGCAC | 448 | GUGCCGUG CUGAUGAGGCCGUUAGGCCGAA ICCAGAGC | 1473 |
| 1139 | CUCUGGCC C ACGGCACA | 449 | UGUGCCGU CUGAUGAGGCCGUUAGGCCGAA IGCCAGAG | 1474 |
| 1140 | UCUGGCCC A CGGCACAU | 450 | AUGUGCCG CUGAUGAGGCCGUUAGGCCGAA IGGCCAGA | 1475 |
| 1145 | CCCACGGC A CAUCAAUG | 451 | CAUUGAUG CUGAUGAGGCCGUUAGGCCGAA ICCGUGGG | 1476 |
| 1147 | CACGGCAC A UCAAUGAC | 452 | GUCAUUGA CUGAUGAGGCCGUUAGGCCGAA IUGCCGUG | 1477 |
| 1150 | GGCACAUC A AUGACUCA | 453 | UGAGUCAU CUGAUGAGGCCGUUAGGCCGAA IAUGUGCC | 1478 |
| 1156 | UCAAUGAC U CACCCUUU | 454 | AAAGGGUG CUGAUGAGGCCGUUAGGCCGAA IUCAUUGA | 1479 |
| 1158 | AAUGACUC A CCCUUUGG | 455 | CCAAAGGG CUGAUGAGGCCGUUAGGCCGAA IAGUCAUU | 1480 |
| 1160 | UGACUCAC C CUUUGGGA | 456 | UCCCAAAG CUGAUGAGGCCGUUAGGCCGAA IUGAGUCA | 1481 |
| 1161 | GACUCACC C UUUGGGAC | 457 | GUCCCAAA CUGAUGAGGCCGUUAGGCCGAA IGUGAGUC | 1482 |
| 1162 | ACUCACCC U UUGGGACU | 458 | AGUCCCAA CUGAUGAGGCCGUUAGGCCGAA IGGUGAGU | 1483 |
| 1170 | UUUGGGAC U CUGCCUGG | 459 | CCAGGCAG CUGAUGAGGCCGUUAGGCCGAA IUCCCAAA | 1484 |
| 1172 | UGGGACUC U GCCUGGCU | 460 | AGCCAGGC CUGAUGAGGCCGUUAGGCCGAA IAGUCCCA | 1485 |
| 1175 | GACUCUGC C UGGCUCUG | 461 | CAGAGCCA CUGAUGAGGCCGUUAGGCCGAA ICAGAGUC | 1486 |
| 1176 | ACUCUGCC U GGCUCUGC | 462 | GCAGAGCC CUGAUGAGGCCGUUAGGCCGAA IGCAGAGU | 1487 |
| 1180 | UGCCUGGC U CUGCUGAG | 463 | CUCAGCAG CUGAUGAGGCCGUUAGGCCGAA ICCAGGCA | 1488 |
| 1182 | CCUGGCUC U GCUGAGCC | 464 | GGCUCAGC CUGAUGAGGCCGUUAGGCCGAA IAGCCAGG | 1489 |
| 1185 | GGCUCUGC U GAGCCCCC | 465 | GGGGGCUC CUGAUGAGGCCGUUAGGCCGAA ICAGAGCC | 1490 |
| 1190 | UGCUGAGC C CCCGCUCA | 466 | UGAGCGGG CUGAUGAGGCCGUUAGGCCGAA ICUCAGCA | 1491 |
| 1191 | GCUGAGCC C CCGCUCAC | 467 | GUGAGCGG CUGAUGAGGCCGUUAGGCCGAA IGCUCAGC | 1492 |
| 1192 | CUGAGCCC C CGCUCACU | 468 | AGUGAGCG CUGAUGAGGCCGUUAGGCCGAA IGGCUCAG | 1493 |
| 1193 | UGAGCCCC C GCUCACUG | 469 | CAGUGAGC CUGAUGAGGCCGUUAGGCCGAA IGGGCUCA | 1494 |
| 1196 | GCCCCCGC U CACUGCAG | 470 | CUGCAGUG CUGAUGAGGCCGUUAGGCCGAA ICGGGGGC | 1495 |
| 1198 | CCCCGCUC A CUCCAGUG | 471 | CACUGCAG CUGAUGAGGCCGUUAGGCCGAA IAGCGGGG | 1496 |
| 1200 | CCGCUCAC U GCAGUGCG | 472 | CGCACUGC CUGAUGAGGCCGUUAGGCCGAA IUGAGCGG | 1497 |
| 1203 | CUCACUGC A GUGCGGCC | 473 | GGCCGCAC CUGAUGAGGCCGUUAGGCCGAA ICAGUGAG | 1498 |
| 1211 | AGUGCGGC C CGAGGGCU | 474 | AGCCCUCG CUGAUGAGGCCGUUAGGCCGAA ICCGCACU | 1499 |
| 1212 | GUGCGGCC C GAGGGCUC | 475 | GAGCCCUC CUGAUGAGGCCGUUAGGCCGAA IGCCGCAC | 1500 |
| 1219 | CCGAGGGC U CCGAGCCA | 476 | UGGCUCGG CUGAUGAGGCCGUUAGGCCGAA ICCCUCGG | 1501 |
| 1221 | GAGGGCUC C GAGCCACC | 477 | GGUGGCUC CUGAUGAGGCCGUUAGGCCGAA IAGCCCUC | 1502 |
| 1226 | CUCCGAGC C ACCAGGGU | 478 | ACCCUGGU CUGAUGAGGCCGUUAGGCCGAA ICUCGGAG | 1503 |
| 1227 | UCCGAGCC A CCAGGGUU | 479 | AACCCUGG CUGAUGAGGCCGUUAGGCCGAA IGCUCGGA | 1504 |
| 1229 | CGAGCCAC C AGGGUUCC | 480 | GGAACCCU CUGAUGAGGCCGUUAGGCCGAA IUGGCUCG | 1505 |
| 1230 | GAGCCACC A GGGUUCCC | 481 | GGGAACCC CUGAUGAGGCCGUUAGGCCGAA IGUGGCUC | 1506 |
| 1237 | CAGGGUUC C CCACCUCG | 482 | CGAGGUGG CUGAUGAGGCCGUUAGGCCGAA IAACCCUG | 1507 |
| 1238 | AGGGUUCC C CACCUCGG | 483 | CCGAGGUG CUGAUGAGGCCGUUAGGCCGAA IGAACCCU | 1508 |
| 1239 | GGGUUCCC C ACCUCGGG | 484 | CCCGAGGU CUGAUGAGGCCGUUAGGCCGAA IGGAACCC | 1509 |
| 1240 | GGUUCCCC A CCUCGGGC | 485 | GCCCGAGG CUGAUGAGGCCGUUAGGCCGAA IGGGAACC | 1510 |
| 1242 | UUCCCCAC C UCGGGCCC | 486 | GGGCCCGA CUGAUGAGGCCGUUAGGCCGAA IUGGGGAA | 1511 |
| 1243 | UCCCCACC U CGGGCCCU | 487 | AGGGCCCG CUGAUGAGGCCGUUAGGCCGAA IGUGGGGA | 1512 |
| 1249 | CCUCGGGC C CUCGCCGG | 488 | CCGGCGAG CUGAUGAGGCCGUUAGGCCGAA ICCCGAGG | 1513 |
| 1250 | CUCGGGCC C UCGCCGGA | 489 | UCCGGCGA CUGAUGAGGCCGUUAGGCCGAA IGCCCGAG | 1514 |
| 1251 | UCGGGCCC U CGCCGGAG | 490 | CUCCGGCG CUGAUGAGGCCGUUAGGCCGAA IGGCCCGA | 1515 |
| 1255 | GCCCUCGC C GGAGGCCA | 491 | UGGCCUCC CUGAUGAGGCCGUUAGGCCGAA ICGAGGGC | 1516 |
| 1262 | CCGGAGGC C AGGCUGUU | 492 | AACAGCCU CUGAUGAGGCCGUUAGGCCGAA ICCUCCGG | 1517 |
| 1263 | CGGAGGCC A GGCUGUUC | 493 | GAACAGCC CUGAUGAGGCCGUUAGGCCGAA IGCCUCCG | 1518 |
| 1267 | GGCCAGGC U GUUCACGC | 494 | GCGUGAAC CUGAUGAGGCCGUUAGGCCGAA ICCUGGCC | 1519 |
| 1272 | GGCUGUUC A CGCAAGAA | 495 | UUCUUGCG CUGAUGAGGCCGUUAGGCCGAA IAACAGCC | 1520 |
| 1276 | GUUCACGC A AGAACCGC | 496 | GCGGUUCU CUGAUGAGGCCGUUAGGCCGAA ICGUGAAC | 1521 |
| 1282 | GCAAGAAC C GCACCCGC | 497 | GCGGGUGC CUGAUGAGGCCGUUAGGCCGAA IUUCUUGC | 1522 |
| 1285 | AGAACCGC A CCCGCAGC | 498 | GCUGCGGG CUGAUGAGGCCGUUAGGCCGAA ICGGUUCU | 1523 |
| 1287 | AACCGCAC C CGCAGCCA | 499 | UGGCUGCG CUGAUGAGGCCGUUAGGCCGAA IUGCGGUU | 1524 |
| 1288 | ACCGCACC C GCAGCCAC | 500 | GUGGCUGC CUGAUGAGGCCGUUAGGCCGAA IGUGCGGU | 1525 |
| 1291 | GCACCCGC A GCCACUGC | 501 | GCAGUGGC CUGAUGAGGCCGUUAGGCCGAA ICGGGUGC | 1526 |
| 1294 | CCCGCAGC C ACUGCCGU | 502 | ACGGCAGU CUGAUGAGGCCGUUAGGCCGAA ICUGCGGG | 1527 |
| 1295 | CCGCAGCC A CUGCCGUC | 503 | GACGGCAG CUGAUGAGGCCGUUAGGCCGAA IGCUGCGG | 1528 |
| 1297 | GCAGCCAC U GCCGUCUG | 504 | CAGACGGC CUGAUGAGGCCGUUAGGCCGAA IUGGCUGC | 1529 |
| 1300 | GCCACUGC C GUCUGGGC | 505 | GCCCAGAC CUGAUGAGGCCGUUAGGCCGAA ICAGUGGC | 1530 |
| 1304 | CUGCCGUC U GGGCCAGG | 506 | CCUGGCCC CUGAUGAGGCCGUUAGGCCGAA IACGGCAG | 1531 |
| 1309 | GUCUGGGC C AGGCAGGC | 507 | GCCUGCCU CUGAUGAGGCCGUUAGGCCGAA ICCCAGAC | 1532 |
| 1310 | UCUGGGCC A GGCAGGCA | 508 | UGCCUGCC CUGAUGAGGCCGUUAGGCCGAA IGCCCAGA | 1533 |
| 1314 | GGCCAGGC A GGCAGCGG | 509 | CCGCUGCC CUGAUGAGGCCGUUAGGCCGAA ICCUGGCC | 1534 |
| 1318 | AGGCAGGC A GCGGGGGU | 510 | ACCCCCGC CUGAUGAGGCCGUUAGGCCGAA ICCUGCCU | 1535 |
| 1335 | GGCGGGAC U GGUGACUC | 511 | GAGUCACC CUGAUGAGGCCGUUAGGCCGAA IUCCCGCC | 1536 |
| 1342 | CUGGUGAC U CAGAAGGC | 512 | GCCUUCUG CUGAUGAGGCCGUUAGGCCGAA IUCACCAG | 1537 |
| 1344 | GGUGACUC A GAAGGCUC | 513 | GAGCCUUC CUGAUGAGGCCGUUAGGCCGAA IAGUCACC | 1538 |
| 1351 | CAGAAGGC U CAGGUGCC | 514 | GGCACCUG CUGAUGAGGCCGUUAGGCCGAA ICCUUCUG | 1539 |
| 1353 | GAAGGCUC A GGUGCCCU | 515 | AGGGCACC CUGAUGAGGCCGUUAGGCCGAA IAGCCUUC | 1540 |
| 1359 | UCAGGUGC C CUACCCAG | 516 | CUGGGUAG CUGAUGAGGCCGUUAGGCCGAA ICACCUGA | 1541 |
| 1360 | CAGGUGCC C UACCCAGC | 517 | GCUGGGUA CUGAUGAGGCCGUUAGGCCGAA IGCACCUG | 1542 |
| 1361 | AGGUGCCC U ACCCAGCC | 518 | GGCUGGGU CUGAUGAGGCCGUUAGGCCGAA IGGCACCU | 1543 |
| 1364 | UGCCCUAC C CAGCCUCA | 519 | UGAGGCUG CUGAUGAGGCCGUUAGGCCGAA IUAGGGCA | 1544 |
| 1365 | GCCCUACC C AGCCUCAC | 520 | GUGAGGCU CUGAUGAGGCCGUUAGGCCGAA IGUAGGGC | 1545 |
| 1366 | CCCUACCC A GCCUCACC | 521 | GGUGAGGC CUGAUGAGGCCGUUAGGCCGAA IGGUAGGG | 1546 |
| 1369 | UACCCAGC C UCACCUGC | 522 | GCAGGUGA CUGAUGAGGCCGUUAGGCCGAA ICUGGGUA | 1547 |
| 1370 | ACCCAGCC U CACCUGCA | 523 | UGCAGGUG CUGAUGAGGCCGUUAGGCCGAA IGCUGGGU | 1548 |
| 1372 | CCAGCCUC A CCUGCAGC | 524 | GCUGCAGG CUGAUGAGGCCGUUAGGCCGAA IAGGCUGG | 1549 |
| 1374 | AGCCUCAC C UGCAGCCU | 525 | AGGCUGCA CUGAUGAGGCCGUUAGGCCGAA IUGAGGCU | 1550 |
| 1375 | GCCUCACC U GCAGCCUC | 526 | GAGGCUGC CUGAUGAGGCCGUUAGGCCGAA IGUGAGGC | 1551 |
| 1378 | UCACCUGC A GCCUCACC | 527 | GGUGAGGC CUGAUGAGGCCGUUAGGCCGAA ICAGGUGA | 1552 |
| 1381 | CCUGCAGC C UCACCCCC | 528 | GGGGGUGA CUGAUGAGGCCGUUAGGCCGAA ICUGCAGG | 1553 |
| 1382 | CUGCAGCC U CACCCCCC | 529 | GGGGGGUG CUGAUGAGGCCGUUAGGCCGAA IGCUGCAG | 1554 |
| 1384 | GCAGCCUC A CCCCCCUG | 530 | CAGGGGGG CUGAUGAGGCCGUUAGGCCGAA IAGGCUGC | 1555 |
| 1386 | AGCCUCAC C CCCCUGGG | 531 | CCCAGGGG CUGAUGAGGCCGUUAGGCCGAA IUGAGGCU | 1556 |
| 1387 | GCCUCACC C CCCUGGGC | 532 | GCCCAGGG CUGAUGAGGCCGUUAGGCCGAA IGUGAGGC | 1557 |
| 1388 | CCUCACCC C CCUGGGCC | 533 | GGCCCAGG CUGAUGAGGCCGUUAGGCCGAA IGGUGAGG | 1558 |
| 1389 | CUCACCCC C CUGGGCCU | 534 | AGGCCCAG CUGAUGAGGCCGUUAGGCCGAA IGGGUGAG | 1559 |
| 1390 | UCACCCCC C UGGGCCUG | 535 | CAGGCCCA CUGAUGAGGCCGUUAGGCCGAA IGGGGUGA | 1560 |
| 1391 | CACCCCCC U GGGCCUGG | 536 | CCAGGCCC CUGAUGAGGCCGUUAGGCCGAA IGGGGGUG | 1561 |
| 1396 | CCCUGGGC C UGGCGCUG | 537 | CAGCGCCA CUGAUGAGGCCGUUAGGCCGAA ICCCAGGG | 1562 |
| 1397 | CCUGGGCC U GGCGCUGG | 538 | CCAGCGCC CUGAUGAGGCCGUUAGGCCGAA IGCCCAGG | 1563 |
| 1403 | CCUGGCGC U GGUGCUGU | 539 | ACAGCACC CUGAUGAGGCCGUUAGGCCGAA ICGCCAGG | 1564 |
| 1409 | GCUGGUGC U GUGGACAG | 540 | CUGUCCAC CUGAUGAGGCCGUUAGGCCGAA ICACCAGC | 1565 |
| 1416 | CUGUGGAC A GUGCUUGG | 541 | CCAAGCAC CUGAUGAGGCCGUUAGGCCGAA IUCCACAG | 1566 |
| 1421 | GACAGUGC U UGGGCCCU | 542 | AGGGCCCA CUGAUGAGGCCGUUAGGCCGAA ICACUGUC | 1567 |
| 1427 | GCUUGGGC C CUGCUGAC | 543 | GUCAGCAG CUGAUGAGGCCGUUAGGCCGAA ICCCAAGC | 1568 |
| 1428 | CUUGGGCC C UGCUGACC | 544 | GGUCAGCA CUGAUGAGGCCGUUAGGCCGAA IGCCCAAG | 1569 |
| 1429 | UUGGGCCC U GCUGACCC | 545 | GGGUCAGC CUGAUGAGGCCGUUAGGCCGAA IGGCCCAA | 1570 |
| 1432 | GGCCCUGC U GACCCCCA | 546 | UGGGGGUC CUGAUGAGGCCGUUAGGCCGAA ICAGGGCC | 1571 |

Input Sequence = AB020693.
Cut Site = CH/.
Arm Length = 8.
Core Sequence = CUGAUGAG GCCGUUAGGC CGAA
AB020693 (Homo sapiens mRNA for KIAA0886 protein (Nogo-A); 4053 bp)
Underlined region can be any X sequence or linker, as described herein.
I = Inosine

[0183] TABLE V
Human NOGO Receptor Zinzyme Ribozyme and Substrate
Sequence

| | | Seq | | Rz Seq |
|---|---|---|---|---|
| Pos | Substrate | ID | Ribozyme | ID |
| 22 | UGAAGAGG G CGUCCGCU | 547 | AGCGGACG GCCGAAAGGCGAGUGAGGUCU CCUCUUCA | 1572 |
| 24 | AAGAGGGC G UCCGCUGG | 548 | CCAGCGGA GCCGAAAGGCGAGUGAGGUCU GCCCUCUU | 1573 |
| 28 | GGGCGUCC G CUGGAGGG | 549 | CCCUCCAG GCCGAAAGGCGAGUGAGGUCU GGACGCCC | 1574 |
| 38 | UGGAGGGA G CCGGCUGC | 550 | GCAGCCGG GCCGAAAGGCGAGUGAGGUCU UCCCUCCA | 1575 |
| 42 | GGGAGCCG G CUGCUGGC | 551 | GCCAGCAG GCCGAAAGGCGAGUGAGGUCU CGGCUCCC | 1576 |
| 45 | AGCCGGCU G CUGGCAUG | 552 | CAUGCCAG GCCGAAAGGCGAGUGAGGUCU AGCCGGCU | 1577 |
| 49 | GGCUGCUG G CAUGGGUG | 553 | CACCCAUG GCCGAAAGGCGAGUGAGGUCU CAGCAGCC | 1578 |
| 55 | UGGCAUGG G UGCUGUGG | 554 | CCACAGCA GCCGAAAGGCGAGUGAGGUCU CCAUGCCA | 1579 |
| 57 | GCAUGGGU G CUGUGGCU | 555 | AGCCACAG GCCGAAAGGCGAGUGAGGUCU ACCCAUGC | 1580 |
| 60 | UGGGUGCU G UGGCUGCA | 556 | UGCAGCCA GCCGAAAGGCGAGUGAGGUCU AGCACCCA | 1581 |
| 63 | GUGCUGUG G CUGCAGGC | 557 | GCCUGCAG GCCGAAAGGCGAGUGAGGUCU CACAGCAC | 1582 |
| 66 | CUGUGGCU G CAGGCCUG | 558 | CAGGCCUG GCCGAAAGGCGAGUGAGGUCU AGCCACAG | 1583 |
| 70 | GGCUGCAG G CCUGGCAG | 559 | CUGCCAGG GCCGAAAGGCGAGUGAGGUCU CUGCAGCC | 1584 |
| 75 | CAGGCCUG G CAGGUGGC | 560 | GCCACCUG GCCGAAAGGCGAGUGAGGUCU CAGGCCUG | 1585 |
| 79 | CCUGGCAG G UGGCAGCC | 561 | GGCUGCCA GCCGAAAGGCGAGUGAGGUCU CUGCCAGG | 1586 |
| 82 | GGCAGGUG G CAGCCCCA | 562 | UGGGGCUG GCCGAAAGGCGAGUGAGGUCU CACCUGCC | 1587 |
| 85 | AGGUGGCA G CCCCAUGC | 563 | GCAUGGGG GCCGAAAGGCGAGUGAGGUCU UGCCACCU | 1588 |
| 92 | AGCCCCAU G CCCAGGUG | 564 | CACCUGGG GCCGAAAGGCGAGUGAGGUCU AUGGGGCU | 1589 |
| 98 | AUGCCCAG G UGCCUGCG | 565 | CGCAGGCA GCCGAAAGGCGAGUGAGGUCU CUGGGCAU | 1590 |
| 100 | GCCCAGGU G CCUGCGUA | 566 | UACGCAGG GCCGAAAGGCGAGUGAGGUCU ACCUGGGC | 1591 |
| 104 | AGGUGCCU G CGUAUGCU | 567 | AGCAUACG GCCGAAAGGCGAGUGAGGUCU AGGCACCU | 1592 |
| 106 | GUGCCUGC G UAUGCUAC | 568 | GUAGCAUA GCCGAAAGGCGAGUGAGGUCU GCAGGCAC | 1593 |
| 110 | CUGCGUAU G CUACAAUG | 569 | CAUUGUAG GCCGAAAGGCGAGUGAGGUCU AUACGCAG | 1594 |
| 120 | UACAAUGA G CCCAAGGU | 570 | ACCUUGGG GCCGAAAGGCGAGUGAGGUCU UCAUUGUA | 1595 |
| 127 | AGCCCAAG G UGACGACA | 571 | UGUCGUCA GCCGAAAGGCGAGUGAGGUCU CUUGGGCU | 1596 |
| 137 | GACGACAA G CUGCCCCC | 572 | GGGGGCAG GCCGAAAGGCGAGUGAGGUCU UUGUCGUC | 1597 |
| 140 | GACAAGCU G CCCCCAGC | 573 | GCUGGGGG GCCGAAAGGCGAGUGAGGUCU AGCUUGUC | 1598 |
| 147 | UGCCCCCA G CAGGGCCU | 574 | AGGCCCUG GCCGAAAGGCGAGUGAGGUCU UGGGGGCA | 1599 |
| 152 | CCAGCAGG G CCUGCAGG | 575 | CCUGCAGG GCCGAAAGGCGAGUGAGGUCU CCUGCUGG | 1600 |
| 156 | CAGGGCCU G CAGGCUGU | 576 | ACAGCCUG GCCGAAAGGCGAGUGAGGUCU AGGCCCUG | 1601 |
| 160 | GCCUGCAG G CUGUGCCC | 577 | GGGCACAG GCCGAAAGGCGAGUGAGGUCU CUGCAGGC | 1602 |
| 163 | UGCAGGCU G UGCCCGUG | 578 | CACGGGCA GCCGAAAGGCGAGUGAGGUCU AGCCUGCA | 1603 |
| 165 | CAGGCUGU G CCCGUGGG | 579 | CCCACGGG GCCGAAAGGCGAGUGAGGUCU ACAGCCUG | 1604 |
| 169 | CUGUGCCC G UGGGCAUC | 580 | GAUGCCCA GCCGAAAGGCGAGUGAGGUCU GGGCACAG | 1605 |
| 173 | GCCCGUGG G CAUCCCUG | 581 | CAGGGAUG GCCGAAAGGCGAGUGAGGUCU CCACGGGC | 1606 |
| 181 | GCAUCCCU G CUGCCAGC | 582 | GCUGGCAG GCCGAAAGGCGAGUGAGGUCU AGGGAUGC | 1607 |
| 184 | UCCCUGCU G CCAGCCAG | 583 | CUGGCUGG GCCGAAAGGCGAGUGAGGUCU AGCAGGGA | 1608 |
| 188 | UGCUGCCA G CCAGCGCA | 584 | UGCGCUGG GCCGAAAGGCGAGUGAGGUCU UGGCAGCA | 1609 |
| 192 | GCCAGCCA G CGCAUCUU | 585 | AAGAUGCG GCCGAAAGGCGAGUGAGGUCU UGGCUGGC | 1610 |
| 194 | CAGCCAGC G CAUCUUCC | 586 | GGAAGAUG GCCGAAAGGCGAGUGAGGUCU GCUGGCUG | 1611 |
| 204 | AUCUUCCU G CACGGCAA | 587 | UUGCCGUG GCCGAAAGGCGAGUGAGGUCU AGGAAGAU | 1612 |
| 209 | CCUGCACG G CAACCGCA | 588 | UGCGGUUG GCCGAAAGGCGAGUGAGGUCU CGUGCAGG | 1613 |
| 572 | CCUGCACG G CAACCGCA | 588 | UGCGGUUG GCCGAAAGGCGAGUGAGGUCU CGUGCAGG | 1614 |
| 215 | CGGCAACC G CAUCUCGC | 589 | GCGAGAUG GCCGAAAGGCGAGUGAGGUCU GGUUGCCG | 1615 |
| 222 | CGCAUCUC G CAUGUGCC | 590 | GGCACAUG GCCGAAAGGCGAGUGAGGUCU GAGAUGCG | 1616 |
| 226 | UCUCGCAU G UGCCAGCU | 591 | AGCUGGCA GCCGAAAGGCGAGUGAGGUCU AUGCGAGA | 1617 |
| 228 | UCGCAUGU G CCAGCUGC | 592 | GCAGCUGG GCCGAAAGGCGAGUGAGGUCU ACAUGCGA | 1618 |
| 232 | AUGUGCCA G CUGCCAGC | 593 | GCUGGCAG GCCGAAAGGCGAGUGAGGUCU UGGCACAU | 1619 |
| 235 | UGCCAGCU G CCAGCUUC | 594 | GAAGCUGG GCCGAAAGGCGAGUGAGGUCU AGCUGGCA | 1620 |
| 239 | AGCUGCCA G CUUCCGUG | 595 | CACGGAAG GCCGAAAGGCGAGUGAGGUCU UGGCAGCU | 1621 |
| 245 | CAGCUUCC G UGCCUGCC | 596 | GGCAGGCA GCCGAAAGGCGAGUGAGGUCU GGAAGCUG | 1622 |
| 247 | GCUUCCGU G CCUGCCGC | 597 | GCGGCAGG GCCGAAAGGCGAGUGAGGUCU ACGGAAGC | 1623 |
| 251 | CCGUGCCU G CCGCAACC | 598 | GGUUGCGG GCCGAAAGGCGAGUGAGGUCU AGGCACGG | 1624 |
| 254 | UGCCUGCC G CAACCUCA | 599 | UGAGGUUG GCCGAAAGGCGAGUGAGGUCU GGCAGGCA | 1625 |
| 270 | ACCAUCCU G UGGCUGCA | 600 | UGCAGCCA GCCGAAAGGCGAGUGAGGUCU AGGAUGGU | 1626 |
| 273 | AUCCUGUG G CUGGACUC | 601 | GAGUGCAG GCCGAAAGGCGAGUGAGGUCU CACAGGAU | 1627 |
| 276 | CUGUGGCU G CACUCGAA | 602 | UUCGAGUG GCCGAAAGGCGAGUGAGGUCU AGCCACAG | 1628 |
| 286 | ACUCGAAU G UGCUGGCC | 603 | GGCCAGCA GCCGAAAGGCGAGUGAGGUCU AUUCGAGU | 1629 |
| 288 | UCGAAUGU G CUGGCCCG | 604 | CGGGCCAG GCCGAAAGGCGAGUGAGGUCU ACAUUCGA | 1630 |
| 292 | AUGUGCUG G CCCGAAUU | 605 | AAUUCGGG GCCGAAAGGCGAGUGAGGUCU CAGCACAU | 1631 |
| 304 | GAAUUGAU G CGGCUGCC | 606 | GGCAGCCG GCCGAAAGGCGAGUGAGGUCU AUCAAUUC | 1632 |
| 307 | UUGAUGCG G CUGCCUUC | 607 | GAAGGCAG GCCGAAAGGCGAGUGAGGUCU CGCAUCAA | 1633 |
| 310 | AUGCGGCU G CCUUCACU | 608 | AGUGAAGG GCCGAAAGGCGAGUGAGGUCU AGCCGCAU | 1634 |
| 320 | CUUCACUG G CCUGGCCC | 609 | GGGCCAGG GCCGAAAGGCGAGUGAGGUCU CAGUGAAG | 1635 |
| 325 | CUGGCCUG G CCCUCCUG | 610 | CAGGAGGG GCCGAAAGGCGAGUGAGGUCU CAGGCCAG | 1636 |
| 336 | CUCCUGGA G CAGCUGGA | 611 | UCCAGCUG GCCGAAAGGCGAGUGAGGUCU UCCAGGAG | 1637 |
| 339 | CUGGAGCA G CUGGACCU | 612 | AGGUCCAG GCCGAAAGGCGAGUGAGGUCU UGCUCCAG | 1638 |
| 350 | GGACCUCA G CGAUAAUG | 613 | CAUUAUCG GCCGAAAGGCGAGUGAGGUCU UGAGGUCC | 1639 |
| 358 | GCGAUAAU G CACAGCUC | 614 | GAGCUGUG GCCGAAAGGCGAGUGAGGUCU AUUAUCGC | 1640 |
| 363 | AAUGCACA G CUCCGGUC | 615 | GACCGGAG GCCGAAAGGCGAGUGAGGUCU UGUGCAUU | 1641 |
| 369 | CAGCUCCG G UCUGUGGA | 616 | UCCACAGA GCCGAAAGGCGAGUGAGGUCU CGGAGCUG | 1642 |
| 373 | UCCGGUCU G UGGACCCU | 617 | AGGGUCCA GCCGAAAGGCGAGUGAGGUCU AGACCGGA | 1643 |
| 382 | UGGACCCU G CCACAUUC | 618 | GAAUGUGG GCCGAAAGGCGAGUGAGGUCU AGGGUCCA | 1644 |
| 395 | AUUCCACG G CCUGGGCC | 619 | GGCCCAGG GCCGAAAGGCGAGUGAGGUCU CGUGGAAU | 1645 |
| 401 | CGGCCUGG G CCGCCUAC | 620 | GUAGGCGG GCCGAAAGGCGAGUGAGGUCU CCAGGCCG | 1646 |
| 404 | CCUGGGCC G CCUACACA | 621 | UGUGUAGG GCCGAAAGGCGAGUGAGGUCU GGCCCAGG | 1647 |
| 414 | CUACACAC G CUGCACCU | 622 | AGGUGCAG GCCGAAAGGCGAGUGAGGUCU GUGUGUAG | 1648 |
| 417 | CACACGCU G CACCUGGA | 623 | UCCAGGUG GCCGAAAGGCGAGUGAGGUCU AGCGUGUG | 1649 |
| 428 | CCUGGACC G CUGCGGCC | 624 | GGCCGCAG GCCGAAAGGCGAGUGAGGUCU GGUCCAGG | 1650 |
| 431 | GGACCGCU G CGGCCUGC | 625 | GCAGGCCG GCCGAAAGGCGAGUGAGGUCU AGCGGUCC | 1651 |
| 434 | CCGCUGCG G CCUGCAGG | 626 | CCUGCAGG GCCGAAAGGCGAGUGAGGUCU CGCAGCGG | 1652 |
| 438 | UGCGGCCU G CAGGAGCU | 627 | AGCUCCUG GCCGAAAGGCGAGUGAGGUCU AGGCCGCA | 1653 |
| 444 | CUGCAGGA G CUGGGCCC | 628 | GGGCCCAG GCCGAAAGGCGAGUGAGGUCU UCCUGCAG | 1654 |
| 449 | GGAGCUGG G CCCGGGGC | 629 | GCCCCGGG GCCGAAAGGCGAGUGAGGUCU CCAGCUCC | 1655 |
| 456 | GGCCCGGG G CUGUUCCG | 630 | CGGAACAG GCCGAAAGGCGAGUGAGGUCU CCCGGGCC | 1656 |
| 459 | CCGGGGCU G UUCCGCGG | 631 | CCGCGGAA GCCGAAAGGCGAGUGAGGUCU AGCCCCGG | 1657 |
| 464 | GCUGUUCC G CGGCCUGG | 632 | CCAGGCCG GCCGAAAGGCGAGUGAGGUCU GGAACAGC | 1658 |
| 467 | GUUCCGCG G CCUGGCUG | 633 | CAGCCAGG GCCGAAAGGCGAGUGAGGUCU CGCGGAAC | 1659 |
| 472 | GCGGCCUG G CUGCCCUG | 634 | CAGGGCAG GCCGAAAGGCGAGUGAGGUCU CAGGCCGC | 1660 |
| 475 | GCCUGGCU G CCCUGCAG | 635 | CUGCAGGG GCCGAAAGGCGAGUGAGGUCU AGCCAGGC | 1661 |
| 480 | GCUGCCCU G CAGUACCU | 636 | AGGUACUG GCCGAAAGGCGAGUGAGGUCU AGGGCAGC | 1662 |
| 483 | GCCCUGCA G UACCUCUA | 637 | UAGAGGUA GCCGAAAGGCGAGUGAGGUCU UGCAGGGC | 1663 |
| 495 | CUCUACCU G CAGGACAA | 638 | UUGUCCUG GCCGAAAGGCGAGUGAGGUCU AGGUAGAG | 1664 |
| 505 | AGGACAAC G CGCUGCAG | 639 | CUGCAGCG GCCGAAAGGCGAGUGAGGUCU GUUGUCCU | 1665 |
| 507 | GACAACGC G CUGCAGGC | 640 | GCCUGCAG GCCGAAAGGCGAGUGAGGUCU GCGUUGUC | 1666 |
| 510 | AACGCGCU G CAGGCACU | 641 | AGUGCCUG GCCGAAAGGCGAGUGAGGUCU AGCGCGUU | 1667 |
| 514 | CGCUGCAG G CACUGCCU | 642 | AGGCAGUG GCCGAAAGGCGAGUGAGGUCU CUGCAGCG | 1668 |
| 519 | CAGGCACU G CCUGAUGA | 643 | UCAUCAGG GCCGAAAGGCGAGUGAGGUCU AGUGCCUG | 1669 |
| 536 | CACCUUCC G CGACCUGG | 644 | CCAGGUCG GCCGAAAGGCGAGUGAGGUCU GGAAGGUG | 1670 |
| 545 | CGACCUGG G CAACCUCA | 645 | UGAGGUUG GCCGAAAGGCGAGUGAGGUCU CCAGGUCG | 1671 |
| 567 | CUCUUCCU G CACGGCAA | 646 | UUGCCGUG GCCGAAAGGCGAGUGAGGUCU AGGAAGAG | 1672 |
| 578 | CGGCAACC G CAUCUCCA | 647 | UGGAGAUG GCCGAAAGGCGAGUGAGGUCU GGUUGCCG | 1673 |
| 587 | CAUCUCCA G CGUGCCCG | 648 | CGGGCACG GCCGAAAGGCGAGUGAGGUCU UGGAGAUG | 1674 |
| 589 | UCUCCAGC G UGCCCGAG | 649 | CUCGGGCA GCCGAAAGGCGAGUGAGGUCU GCUGGAGA | 1675 |
| 591 | UCCAGCGU G CCCGAGCG | 650 | CGCUCGGG GCCGAAAGGCGAGUGAGGUCU ACGCUGGA | 1676 |
| 597 | GUGCCCGA G CGCGCCUU | 651 | AAGGCGCG GCCGAAAGGCGAGUGAGGUCU UCGGGCAC | 1677 |
| 599 | GCCCGAGC G CGCCUUCC | 652 | GGAAGGCG GCCGAAAGGCGAGUGAGGUCU GCUCGGGC | 1678 |
| 601 | CCGAGCGC G CCUUCCGU | 653 | ACGGAAGG GCCGAAAGGCGAGUGAGGUCU GCGCUCGG | 1679 |
| 608 | CGCCUUCC G UGGGCUGC | 654 | GCAGCCCA GCCGAAAGGCGAGUGAGGUCU GGAAGGCG | 1680 |
| 612 | UUCCGUGG G CUGCACAG | 655 | CUGUGCAG GCCGAAAGGCGAGUGAGGUCU CCACGGAA | 1681 |
| 615 | CGUGGGCU G CACAGCCU | 656 | AGGCUGUG GCCGAAAGGCGAGUGAGGUCU AGCCCACG | 1682 |
| 620 | GCUGCACA G CCUCGACC | 657 | GGUCGAGG GCCGAAAGGCGAGUGAGGUCU UGUGCAGC | 1683 |
| 629 | CCUCGACC G UCUCCUAC | 658 | GUAGGAGA GCCGAAAGGCGAGUGAGGUCU GGUCGAGG | 1684 |
| 639 | CUCCUACU G CACCAGAA | 659 | UUCUGGUG GCCGAAAGGCGAGUGAGGUCU AGUAGGAG | 1685 |
| 650 | CCAGAACC G CGUGGCCC | 660 | GGGCCACG GCCGAAAGGCGAGUGAGGUCU GGUUCUGG | 1686 |
| 652 | AGAACCGC G UGGCCCAU | 661 | AUGGGCCA GCCGAAAGGCGAGUGAGGUCU GCGGUUCU | 1687 |
| 655 | ACCGCGUG G CCCAUGUG | 662 | CACAUGGG GCCGAAAGGCGAGUGAGGUCU CACGCGGU | 1688 |
| 661 | UGGCCCAU G UGCACCCG | 663 | CGGGUGCA GCCGAAAGGCGAGUGAGGUCU AUGGGCCA | 1689 |
| 663 | GCCCAUGU G CACCCGCA | 664 | UGCGGGUG GCCGAAAGGCGAGUGAGGUCU ACAUGGGC | 1690 |
| 669 | GUGCACCC G CAUGCCUU | 665 | AAGGCAUG GCCGAAAGGCGAGUGAGGUCU GGGUGCAC | 1691 |
| 673 | ACCCGCAU G CCUUCCGU | 666 | ACGGAAGG GCCGAAAGGCGAGUGAGGUCU AUGCGGGU | 1692 |
| 680 | UGCCUUCC G UGACCUUG | 667 | CAAGGUCA GCCGAAAGGCGAGUGAGGUCU GGAAGGCA | 1693 |
| 689 | UGACCUUG G CCGCCUCA | 668 | UGAGGCGG GCCGAAAGGCGAGUGAGGUCU CAAGGUCA | 1694 |
| 692 | CCUUGGCC G CCUCAUGA | 669 | UCAUGAGG GCCGAAAGGCGAGUGAGGUCU GGCCAAGG | 1695 |
| 711 | CUCUAUCU G UUUGCCAA | 670 | UUGGCAAA GCCGAAAGGCGAGUGAGGUCU AGAUAGAG | 1696 |
| 715 | AUCUGUUU G CCAACAAU | 671 | AUUGUUGG GCCGAAAGGCGAGUGAGGUCU AAACAGAU | 1697 |
| 730 | AUCUAUCA G CGCUGCCC | 672 | GGGCAGCG GCCGAAAGGCGAGUGAGGUCU UGAUAGAU | 1698 |
| 732 | CUAUCAGC G CUGCCCAC | 673 | GUGGGCAG GCCGAAAGGCGAGUGAGGUCU GCUGAUAG | 1699 |
| 735 | UCAGCGCU G CCCACUGA | 674 | UCAGUGGG GCCGAAAGGCGAGUGAGGUCU AGCGCUGA | 1700 |
| 745 | CCACUGAG G CCCUGGCC | 675 | GGCCAGGG GCCGAAAGGCGAGUGAGGUCU CUCAGUGG | 1701 |
| 751 | AGGCCCUG G CCCCCCUG | 676 | CAGGGGGG GCCGAAAGGCGAGUGAGGUCU CAGGGCCU | 1702 |
| 759 | GCCCCCCU G CGUGCCCU | 677 | AGGGCACG GCCGAAAGGCGAGUGAGGUCU AGGGGGGC | 1703 |
| 761 | CCCCCUGC G UGCCCUGC | 678 | GCAGGGCA GCCGAAAGGCGAGUGAGGUCU GCAGGGGG | 1704 |
| 763 | CCCUGCGU G CCCUGCAG | 679 | CUGCAGGG GCCGAAAGGCGAGUGAGGUCU ACGCAGGG | 1705 |
| 768 | CGUGCCCU G CAGUACCU | 680 | AGGUACUG GCCGAAAGGCGAGUGAGGUCU AGGGCACG | 1706 |
| 771 | GCCCUGCA G UACCUGAG | 681 | CUCAGGUA GCCGAAAGGCGAGUGAGGUCU UGCAGGGC | 1707 |
| 780 | UACCUGAG G CUCAACGA | 682 | UCGUUGAG GCCGAAAGGCGAGUGAGGUCU CUCAGGUA | 1708 |
| 799 | ACCCCUGG G UGUGUGAC | 683 | GUCACACA GCCGAAAGGCGAGUGAGGUCU CCAGGGGU | 1709 |
| 801 | CCCUGGGU G UGUGACUG | 684 | CAGUCACA GCCGAAAGGCGAGUGAGGUCU ACCCAGGG | 1710 |
| 803 | CUGGGUGU G UGACUGCC | 685 | GGCAGUCA GCCGAAAGGCGAGUGAGGUCU ACACCCAG | 1711 |
| 809 | GUGUGACU G CCGGGCAC | 686 | GUGCCCGG GCCGAAAGGCGAGUGAGGUCU AGUCACAC | 1712 |
| 814 | ACUGCCGG G CACGCCCA | 687 | UGGGCGUG GCCGAAAGGCGAGUGAGGUCU CCGGCAGU | 1713 |
| 818 | CCGGGCAC G CCCACUCU | 688 | AGAGUGGG GCCGAAAGGCGAGUGAGGUCU GUGCCCGG | 1714 |
| 829 | CACUCUGG G CCUGGCUG | 689 | CAGCCAGG GCCGAAAGGCGAGUGAGGUCU CCAGAGUG | 1715 |
| 834 | UGGGCCUG G CUGCAGAA | 690 | UUCUGCAG GCCGAAAGGCGAGUGAGGUCU CAGGCCCA | 1716 |
| 837 | GCCUGGCU G CAGAAGUU | 691 | AACUUCUG GCCGAAAGGCGAGUGAGGUCU AGCCAGGC | 1717 |
| 843 | CUGCAGAA G UUCCGCGG | 692 | CCGCGGAA GCCGAAAGGCGAGUGAGGUCU UUCUGCAG | 1718 |
| 848 | GAAGUUCC G CGGCUCCU | 693 | AGGAGCCG GCCGAAAGGCGAGUGAGGUCU GGAACUUC | 1719 |
| 851 | GUUCCGCG G CUCCUCCU | 694 | AGGAGGAG GCCGAAAGGCGAGUGAGGUCU CGCGGAAC | 1720 |
| 865 | CCUCCGAG G UGCCCUGC | 695 | GCAGGGCA GCCGAAAGGCGAGUGAGGUCU CUCGGAGG | 1721 |
| 867 | UCCGAGGU G CCCUGCAG | 696 | CUGCAGGG GCCGAAAGGCGAGUGAGGUCU ACCUCGGA | 1722 |
| 872 | GGUGCCCU G CAGCCUCC | 697 | GGAGGCUG GCCGAAAGGCGAGUGAGGUCU AGGGCACC | 1723 |
| 875 | GCCCUGCA G CCUCCCGC | 698 | GCGGGAGG GCCGAAAGGCGAGUGAGGUCU UGCAGGGC | 1724 |
| 882 | AGCCUCCC G CAACGCCU | 699 | AGGCGUUG GCCGAAAGGCGAGUGAGGUCU GGGAGGCU | 1725 |
| 887 | CCCGCAAC G CCUGGCUG | 700 | CAGCCAGG GCCGAAAGGCGAGUGAGGUCU GUUGCGGG | 1726 |
| 892 | AACGCCUG G CUGGCCGU | 701 | ACGGCCAG GCCGAAAGGCGAGUGAGGUCU CAGGCGUU | 1727 |
| 896 | CCUGGCUG G CCGUGACC | 702 | GGUCACGG GCCGAAAGGCGAGUGAGGUCU CAGCCAGG | 1728 |
| 899 | GGCUGGCC G UGACCUCA | 703 | UGAGGUCA GCCGAAAGGCGAGUGAGGUCU GGCCAGCC | 1729 |
| 911 | CCUCAAAC G CCUAGCUG | 704 | CAGCUAGG GCCGAAAGGCGAGUGAGGUCU GUUUGAGG | 1730 |
| 916 | AACGCCUA G CUGCCAAU | 705 | AUUGGCAG GCCGAAAGGCGAGUGAGGUCU UAGGCGUU | 1731 |
| 919 | GCCUAGCU G CCAAUGAC | 706 | GUCAUUGG GCCGAAAGGCGAGUGAGGUCU AGCUAGGC | 1732 |
| 930 | AAUGACCU G CAGGGCUG | 707 | CAGCCCUG GCCGAAAGGCGAGUGAGGUCU AGGUCAUU | 1733 |
| 935 | CCUGCAGG G CUGCGCUG | 708 | CAGCGCAG GCCGAAAGGCGAGUGAGGUCU CCUGCAGG | 1734 |
| 938 | GCAGGGCU G CGCUGUGG | 709 | CCACAGCG GCCGAAAGGCGAGUGAGGUCU AGCCCUGC | 1735 |
| 940 | AGGGCUGC G CUGUGGCC | 710 | GGCCACAG GCCGAAAGGCGAGUGAGGUCU GCAGCCCU | 1736 |
| 943 | GCUGCGCU G UGGCCACC | 711 | GGUGGCCA GCCGAAAGGCGAGUGAGGUCU AGCGCAGC | 1737 |
| 946 | GCGCUGUG G CCACCGGC | 712 | GCCGGUGG GCCGAAAGGCGAGUGAGGUCU CACAGCGC | 1738 |
| 953 | GGCCACCG G CCCUUACC | 713 | GGUAAGGG GCCGAAAGGCGAGUGAGGUCU CGGUGGCC | 1739 |
| 977 | CUGGACCG G CAGGGCCA | 714 | UGGCCCUG GCCGAAAGGCGAGUGAGGUCU CGGUCCAG | 1740 |
| 982 | CCGGCAGG G CCACCGAU | 715 | AUCGGUGG GCCGAAAGGCGAGUGAGGUCU CCUGCCGG | 1741 |
| 996 | GAUGAGGA G CCGCUGGG | 716 | CCCAGCGG GCCGAAAGGCGAGUGAGGUCU UCCUCAUC | 1742 |
| 999 | GAGGAGCC G CUGGGGCU | 717 | AGCCCCAG GCCGAAAGGCGAGUGAGGUCU GGCUCCUC | 1743 |
| 1005 | CCGCUGGG G CUUCCCAA | 718 | UUGGGAAG GCCGAAAGGCGAGUGAGGUCU CCCAGCGG | 1744 |
| 1014 | CUUCCCAA G UGCUGCCA | 719 | UGGCAGCA GCCGAAAGGCGAGUGAGGUCU UUGGGAAG | 1745 |
| 1016 | UCCCAAGU G CUGCCAGC | 720 | GCUGGCAG GCCGAAAGGCGAGUGAGGUCU ACUUGGGA | 1746 |
| 1019 | CAAGUGCU G CCAGCCAG | 721 | CUGGCUGG GCCGAAAGGCGAGUGAGGUCU AGCACUUG | 1747 |
| 1023 | UGCUGCCA G CCAGAUGC | 722 | GCAUCUGG GCCGAAAGGCGAGUGAGGUCU UGGCAGCA | 1748 |
| 1030 | AGCCAGAU G CCGCUGAC | 723 | GUCAGCGG GCCGAAAGGCGAGUGAGGUCU AUCUGGCU | 1749 |
| 1033 | CAGAUGCC G CUGACAAG | 724 | CUUGUCAG GCCGAAAGGCGAGUGAGGUCU GGCAUCUG | 1750 |
| 1042 | CUGACAAG G CCUCAGUA | 725 | UACUGAGG GCCGAAAGGCGAGUGAGGUCU CUUGUCAG | 1751 |
| 1048 | AGGCCUCA G UACUGGAG | 726 | CUCCAGUA GCCGAAAGGCGAGUGAGGUCU UGAGGCCU | 1752 |
| 1056 | GUACUGGA G CCUGGAAG | 727 | CUUCCAGG GCCGAAAGGCGAGUGAGGUCU UCCAGUAC | 1753 |
| 1069 | GAAGACCA G CUUCGGCA | 728 | UGCCGAAG GCCGAAAGGCGAGUGAGGUCU UGGUCUUC | 1754 |
| 1075 | CAGCUUCG G CAGGCAAU | 729 | AUUGCCUG GCCGAAAGGCGAGUGAGGUCU CGAAGCUG | 1755 |
| 1079 | UUCGGCAG G CAAUGCGC | 730 | GCGCAUUG GCCGAAAGGCGAGUGAGGUCU CUGCCGAA | 1756 |
| 1084 | CAGGCAAU G CGCUGAAG | 731 | CUUCAGCG GCCGAAAGGCGAGUGAGGUCU AUUGCCUG | 1757 |
| 1086 | GGCAAUGC G CUGAAGGG | 732 | CCCUUCAG GCCGAAAGGCGAGUGAGGUCU GCAUUGCC | 1758 |
| 1097 | GAAGGGAC G CGUGCCGC | 733 | GCGGCACG GCCGAAAGGCGAGUGAGGUCU GUCCCUUC | 1759 |
| 1099 | AGGGACGC G UGCCGCCC | 734 | GGGCGGCA GCCGAAAGGCGAGUGAGGUCU GCGUCCCU | 1760 |
| 1101 | GGACGCGU G CCGCCCGG | 735 | CCGGGCGG GCCGAAAGGCGAGUGAGGUCU ACGCGUCC | 1761 |
| 1104 | CGCGUGCC G CCCGGUGA | 736 | UCACCGGG GCCGAAAGGCGAGUGAGGUCU GGCACGCG | 1762 |
| 1109 | GCCGCCCG G UGACAGCC | 737 | GGCUGUCA GCCGAAAGGCGAGUGAGGUCU CGGGCGGC | 1763 |
| 1115 | CGGUGACA G CCCGCCGG | 738 | CCGGCGGG GCCGAAAGGCGAGUGAGGUCU UGUCACCG | 1764 |
| 1119 | GACAGCCC G CCGGGCAA | 739 | UUGCCCGG GCCGAAAGGCGAGUGAGGUCU GGGCUGUC | 1765 |
| 1124 | CCCGCCGG G CAACGGCU | 740 | AGCCGUUG GCCGAAAGGCGAGUGAGGUCU CCGGCGGG | 1766 |
| 1130 | GGGCAACG G CUCUGGCC | 741 | GGCCAGAG GCCGAAAGGCGAGUGAGGUCU CGUUGCCC | 1767 |
| 1136 | CGGCUCUG G CCCACGGC | 742 | GCCGUGGG GCCGAAAGGCGAGUGAGGUCU CAGAGCCG | 1768 |
| 1143 | GGCCCACG G CACAUCAA | 743 | UUGAUGUG GCCGAAAGGCGAGUGAGGUCU CGUGGGCC | 1769 |
| 1173 | GGGACUCU G CCUGGCUC | 744 | GAGCCAGG GCCGAAAGGCGAGUGAGGUCU AGAGUCCC | 1770 |
| 1178 | UCUGCCUG G CUCUGCUG | 745 | CAGCAGAG GCCGAAAGGCGAGUGAGGUCU CAGGCAGA | 1771 |
| 1183 | CUGGCUCU G CUGAGCCC | 746 | GGGCUCAG GCCGAAAGGCGAGUGAGGUCU AGAGCCAG | 1772 |
| 1188 | UCUGCUGA G CCCCCGCU | 747 | AGCGGGGG GCCGAAAGGCGAGUGAGGUCU UCAGCAGA | 1773 |
| 1194 | GAGCCCCC G CUCACUGC | 748 | GCAGUGAG GCCGAAAGGCGAGUGAGGUCU GGGGGCUC | 1774 |
| 1201 | CGCUCACU G CAGUGCGG | 749 | CCGCACUG GCCGAAAGGCGAGUGAGGUCU AGUGAGCG | 1775 |
| 1204 | UCACUGCA G UGCGGCCC | 750 | GGGCCGCA GCCGAAAGGCGAGUGAGGUCU UGCAGUGA | 1776 |
| 1206 | ACUGCAGU G CGGCCCGA | 751 | UCGGGCCG GCCGAAAGGCGAGUGAGGUCU ACUGCAGU | 1777 |
| 1209 | GCAGUGCG G CCCGAGGG | 752 | CCCUCGGG GCCGAAAGGCGAGUGAGGUCU CGCACUGC | 1778 |
| 1217 | GCCCGAGG G CUCCGAGC | 753 | GCUCGGAG GCCGAAAGGCGAGUGAGGUCU CCUCGGGC | 1779 |
| 1224 | GGCUCCGA G CCACCAGG | 754 | CCUGGUGG GCCGAAAGGCGAGUGAGGUCU UCGGAGCC | 1780 |
| 1233 | CCACCAGG G UUCCCCAC | 755 | GUGGGGAA GCCGAAAGGCGAGUGAGGUCU CCUGGUGG | 1781 |
| 1247 | CACCUCGG G CCCUCGCC | 756 | GGCGAGGG GCCGAAAGGCGAGUGAGGUCU CCGAGGUG | 1782 |
| 1253 | GGGCCCUC G CCGGAGGC | 757 | GCCUCCGG GCCGAAAGGCGAGUGAGGUCU GAGGGCCC | 1783 |
| 1260 | CGCCGGAG G CCAGGCUG | 758 | CAGCCUGG GCCGAAAGGCGAGUGAGGUCU CUCCGGCG | 1784 |
| 1265 | GAGGCCAG G CUGUUCAC | 759 | GUGAACAG GCCGAAAGGCGAGUGAGGUCU CUGGCCUC | 1785 |
| 1268 | GCCAGGCU G UUCACGCA | 760 | UGCGUGAA GCCGAAAGGCGAGUGAGGUCU AGCCUGGC | 1786 |
| 1274 | CUGUUCAC G CAAGAACC | 761 | GGUUCUUG GCCGAAAGGCGAGUGAGGUCU GUGAACAG | 1787 |
| 1283 | CAAGAACC G CACCCGCA | 762 | UGCGGGUG GCCGAAAGGCGAGUGAGGUCU GGUUCUUG | 1788 |
| 1289 | CCGCACCC G CAGCCACU | 763 | AGUGGCUG GCCGAAAGGCGAGUGAGGUCU GGGUGCGG | 1789 |
| 1292 | CACCCGCA G CCACUGCC | 764 | GGCAGUGG GCCGAAAGGCGAGUGAGGUCU UGCGGGUG | 1790 |
| 1298 | CAGCCACU G CCGUCUGG | 765 | CCAGACGG GCCGAAAGGCGAGUGAGGUCU AGUGGCUG | 1791 |
| 1301 | CCACUGCC G UCUGGGCC | 766 | GGCCCAGA GCCGAAAGGCGAGUGAGGUCU GGCAGUGG | 1792 |
| 1307 | CCGUCUGG G CCAGGCAG | 767 | CUGCCUGG GCCGAAAGGCGAGUGAGGUCU CCAGACGG | 1793 |
| 1312 | UGGGCCAG G CAGGCAGC | 768 | GCUGCCUG GCCGAAAGGCGAGUGAGGUCU CUGGCCCA | 1794 |
| 1316 | CCAGGCAG G CAGCGGGG | 769 | CCCCGCUG GCCGAAAGGCGAGUGAGGUCU CUGCCUGG | 1795 |
| 1319 | GGCAGGCA G CGGGGGUG | 770 | CACCCCCG GCCGAAAGGCGAGUGAGGUCU UGCCUGCC | 1796 |
| 1325 | CAGCGGGG G UGGCGGGA | 771 | UCCCGCCA GCCGAAAGGCGAGUGAGGUCU CCCCGCUG | 1797 |
| 1328 | CGGGGGUG G CGGGACUG | 772 | CAGUCCCG GCCGAAAGGCGAGUGAGGUCU CACCCCCG | 1798 |
| 1337 | CGGGACUG G UGACUCAG | 773 | CUGAGUCA GCCGAAAGGCGAGUGAGGUCU CAGUCCCG | 1799 |
| 1349 | CUCAGAAG G CUCAGGUG | 774 | CACCUGAG GCCGAAAGGCGAGUGAGGUCU CUUCUGAG | 1800 |
| 1355 | AGGCUCAG G UGCCCUAC | 775 | GUAGGGCA GCCGAAAGGCGAGUGAGGUCU CUGAGCCU | 1801 |
| 1357 | GCUCAGGU G CCCUACCC | 776 | GGGUAGGG GCCGAAAGGCGAGUGAGGUCU ACCUGAGC | 1802 |
| 1367 | CCUACCCA G CCUCACCU | 777 | AGGUGAGG GCCGAAAGGCGAGUGAGGUCU UGGGUAGG | 1803 |
| 1376 | CCUCACCU G CAGCCUCA | 778 | UGAGGCUG GCCGAAAGGCGAGUGAGGUCU AGGUGAGG | 1804 |
| 1379 | CACCUGCA G CCUCACCC | 779 | GGGUGAGG GCCGAAAGGCGAGUGAGGUCU UGCAGGUG | 1805 |
| 1394 | CCCCCUGG G CCUGGCGC | 780 | GCGCCAGG GCCGAAAGGCGAGUGAGGUCU CCAGGGGG | 1806 |
| 1399 | UGGGCCUG G CGCUGGUG | 781 | CACCAGCG GCCGAAAGGCGAGUGAGGUCU CAGGCCCA | 1807 |
| 1401 | GGCCUGGC G CUGGUGCU | 782 | AGCACCAG GCCGAAAGGCGAGUGAGGUCU GCCAGGCC | 1808 |
| 1405 | UGGCGCUG G UGCUGUGG | 783 | CCACAGCA GCCGAAAGGCGAGUGAGGUCU CAGCGCCA | 1809 |
| 1407 | GCGCUGGU G CUGUGGAC | 784 | GUCCACAG GCCGAAAGGCGAGUGAGGUCU ACCAGCGC | 1810 |
| 1410 | CUGGUGCU G UGGACAGU | 785 | ACUGUCCA GCCGAAAGGCGAGUGAGGUCU AGCACCAG | 1811 |
| 1417 | UGUGGACA G UGCUUGGG | 786 | CCCAAGCA GCCGAAAGGCGAGUGAGGUCU UGUCCACA | 1812 |
| 1419 | UGGACAGU G CUUGGGCC | 787 | GGCCCAAG GCCGAAAGGCGAGUGAGGUCU ACUGUCCA | 1813 |
| 1425 | GUGCUUGG G CCCUGCUG | 788 | CAGCAGGG GCCGAAAGGCGAGUGAGGUCU CCAAGCAC | 1814 |
| 1430 | UGGGCCCU G CUGACCCC | 789 | GGGGUCAG GCCGAAAGGCGAGUGAGGUCU AGGGCCCA | 1815 |

Input Sequence = AF283463.
Cut Site = G/Y
Arm Length = 8.
Core Sequence = GCcgaaagGCGaGuCaaGGuCu
AF283463 (Homo sapiens Nogo receptor mRNA, complete cds.; 1441 bp)

[0184] TABLE VI
Human NOGO Receptor DNAzyme and Substrate Sequence

| | | Seq | | |
|---|---|---|---|---|
| Pos | Substrate | ID | DNAzyme | Seq ID |
| 10 | CAACCCCU A CGAUGAAG | 1 | CTTCATCG GGCTAGCTACAACGA AGGGGTTG | 1816 |
| 108 | GCCUGCGU A UGCUACAA | 3 | TTGTAGCA GGCTAGCTACAACGA ACGCAGGC | 1817 |
| 113 | CGUAUGCU A CAAUGAGC | 4 | GCTCATTG GGCTAGCTACAACGA AGCATACG | 1818 |
| 408 | GGCCGCCU A CACACGCU | 26 | AGCGTGTG GGCTAGCTACAACGA AGGCGGCC | 1819 |
| 485 | CCUGCAGU A CCUCUACC | 29 | GGTAGAGG GGCTAGCTACAACGA ACTGCAGG | 1820 |
| 491 | GUACCUCU A CCUGCAGG | 31 | CCTGCAGG GGCTAGCTACAACGA AGAGGTAC | 1821 |
| 636 | CGUCUCCU A CUGCACCA | 45 | TGGTGCAG GGCTAGCTACAACGA AGGAGACG | 1822 |
| 707 | GACACUCU A UCUGUUUG | 51 | CAAACAGA GGCTAGCTACAACGA AGAGTGTC | 1823 |
| 726 | AACAAUCU A UCAGCGCU | 56 | AGCGCTGA GGCTAGCTACAACGA AGATTGTT | 1824 |
| 773 | CCUGCAGU A CCUGAGGC | 58 | GCCTCAGG GGCTAGCTACAACGA ACTGCAGG | 1825 |
| 959 | CGGCCCUU A CCAUCCCA | 70 | TGGGATGG GGCTAGCTACAACGA AAGGGCCG | 1826 |
| 1050 | GCCUCAGU A CUGGAGCC | 76 | GGCTCCAG GGCTAGCTACAACGA ACTGAGGC | 1827 |
| 1362 | GGUGCCCU A CCCAGCCU | 97 | AGGCTGGG GGCTAGCTACAACGA AGGGCACC | 1828 |
| 51 | CUGCUGGC A UGGGUGCU | 107 | AGCACCCA GGCTAGCTACAACGA GCCAGCAG | 1829 |
| 90 | GCAGCCCC A UGCCCAGG | 118 | CCTGGGCA GGCTAGCTACAACGA GGGGCTGC | 1830 |
| 175 | CCGUGGGC A UCCCUGCU | 143 | AGCAGGGA GGCTAGCTACAACGA GCCCACGG | 1831 |
| 196 | GCCAGCGC A UCUUCCUG | 152 | CAGGAAGA GGCTAGCTACAACGA GCGCTGGC | 1832 |
| 206 | CUUCCUGC A CGGCAACC | 156 | GGTTGCCG GGCTAGCTACAACGA GCAGGAAG | 1833 |
| 569 | CUUCCUGC A CGGCAACC | 156 | GGTTGCCG GGCTAGCTACAACGA GCAGGAAG | 1834 |
| 217 | GCAACCGC A UCUCGCAU | 159 | ATGCGAGA GGCTAGCTACAACGA GCGGTTGC | 1835 |
| 224 | CAUCUCGC A UGUGCCAG | 161 | CTGGCACA GGCTAGCTACAACGA GCGAGATG | 1836 |
| 262 | GCAACCUC A CCAUCCUG | 175 | CAGGATGG GGCTAGCTACAACGA GAGGTTGC | 1837 |
| 265 | ACCUCACC A UCCUGUGG | 177 | CCACAGGA GGCTAGCTACAACGA GGTGAGGT | 1838 |
| 278 | GUGGCUGC A CUCGAAUG | 181 | CATTCGAG GGCTAGCTACAACGA GCAGCCAC | 1839 |
| 316 | CUGCCUUC A CUGGCCUG | 189 | CAGGCCAG GGCTAGCTACAACGA GAAGGCAG | 1840 |
| 360 | GAUAAUGC A CAGCUCCG | 203 | CGGAGCTG GGCTAGCTACAACGA GCATTATC | 1841 |
| 385 | ACCCUGCC A CAUUCCAC | 212 | GTGGAATG GGCTAGCTACAACGA GGCAGGGT | 1842 |
| 387 | CCUGCCAC A UUCCACGG | 213 | CCGTGGAA GGCTAGCTACAACGA GTGGCAGG | 1843 |
| 392 | CACAUUCC A CGGCCUGG | 215 | CCAGGCCG GGCTAGCTACAACGA GGAATGTG | 1844 |
| 410 | CCGCCUAC A CACGCUGC | 221 | GCAGCGTG GGCTAGCTACAACGA GTAGGCGG | 1845 |
| 412 | GCCUACAC A CGCUGCAC | 222 | GTGCAGCG GGCTAGCTACAACGA GTGTAGGC | 1846 |
| 419 | CACGCUGC A CCUGGACC | 224 | GGTCCAGG GGCTAGCTACAACGA GCAGCGTG | 1847 |
| 516 | CUGCAGGC A CUGCCUGA | 253 | TCAGGCAG GGCTAGCTACAACGA GCCTGCAG | 1848 |
| 529 | CUGAUGAC A CCUUCCGC | 257 | GCGGAAGG GGCTAGCTACAACGA GTCATCAG | 1849 |
| 553 | GCAACCUC A CACACCUC | 266 | GAGGTGTG GGCTAGCTACAACGA GAGGTTGC | 1850 |
| 555 | AACCUCAC A CACCUCUU | 267 | AAGAGGTG GGCTAGCTACAACGA GTGAGGTT | 1851 |
| 557 | CCUCACAC A CCUCUUCC | 268 | GGAAGAGG GGCTAGCTACAACGA GTGTGAGG | 1852 |
| 580 | GCAACCGC A UCUCCAGC | 275 | GCTGGAGA GGCTAGCTACAACGA GCGGTTGC | 1853 |
| 617 | UGGGCUGC A CAGCCUCG | 285 | CGAGGCTG GGCTAGCTACAACGA GCAGCCCA | 1854 |
| 641 | CCUACUGC A CCAGAACC | 294 | GGTTCTGG GGCTAGCTACAACGA GCAGTAGG | 1855 |
| 659 | CGUGGCCC A UGUGCACC | 300 | GGTGCACA GGCTAGCTACAACGA GGGCCACG | 1856 |
| 665 | CCAUGUGC A CCCGCAUG | 301 | CATGCGGG GGCTAGCTACAACGA GCACATGG | 1857 |
| 671 | GCACCCGC A UGCCUUCC | 304 | GGAAGGCA GGCTAGCTACAACGA GCGGGTGC | 1858 |
| 697 | GCCGCCUC A UGACACUC | 313 | GAGTGTCA GGCTAGCTACAACGA GAGGCGGC | 1859 |
| 702 | CUCAUGAC A CUCUAUCU | 314 | AGATAGAG GGCTAGCTACAACGA GTCATGAG | 1860 |
| 739 | CGCUGCCC A CUGAGGCC | 326 | GGCCTCAG GGCTAGCTACAACGA GGGCAGCG | 1861 |
| 816 | UGCCGGGC A CGCCCACU | 352 | AGTGGGCG GGCTAGCTACAACGA GCCCGGCA | 1862 |
| 822 | GCACGCCC A CUCUGGGC | 355 | GCCCAGAG GGCTAGCTACAACGA GGGCGTGC | 1863 |
| 949 | CUGUGGCC A CCGGCCCU | 396 | AGGGCCGG GGCTAGCTACAACGA GGCCACAG | 1864 |
| 962 | CCCUUACC A UCCCAUCU | 402 | AGATGGGA GGCTAGCTACAACGA GGTAAGGG | 1865 |
| 967 | ACCAUCCC A UCUGGACC | 405 | GGTCCAGA GGCTAGCTACAACGA GGGATGGT | 1866 |
| 985 | GCAGGGCC A CCGAUGAG | 410 | CTCATCGG GGCTAGCTACAACGA GGCCCTGC | 1867 |
| 1140 | UCUGGCCC A CGGCACAU | 450 | ATGTGCCG GGCTAGCTACAACGA GGGCCAGA | 1868 |
| 1145 | CCCACGGC A CAUCAAUG | 451 | CATTGATG GGCTAGCTACAACGA GCCGTGGG | 1869 |
| 1147 | CACGGCAC A UCAAUGAC | 452 | GTCATTGA GGCTAGCTACAACGA GTGCCGTG | 1870 |
| 1158 | AAUGACUC A CCCUUUGG | 455 | CCAAAGGG GGCTAGCTACAACGA GAGTCATT | 1871 |
| 1198 | CCCCGCUC A CUGCAGUG | 471 | CACTGCAG GGCTAGCTACAACGA GAGCGGGG | 1872 |
| 1227 | UCCGAGCC A CCAGGGUU | 479 | AACCCTGG GGCTAGCTACAACGA GGCTCGGA | 1873 |
| 1240 | GGUUCCCC A CCUCGGGC | 485 | GCCCGAGG GGCTAGCTACAACGA GGGGAACC | 1874 |
| 1272 | CGCUGUUC A CGCAAGAA | 495 | TTCTTGCG GGCTAGCTACAACGA GAACAGCC | 1875 |
| 1285 | AGAACCGC A CCCGCAGC | 498 | GCTGCGGG GGCTAGCTACAACGA GCGGTTCT | 1876 |
| 1295 | CCGCAGCC A CUGCCGUC | 503 | GACGGCAG GGCTAGCTACAACGA GGCTGCGG | 1877 |
| 1372 | CCAGCCUC A CCUGCAGC | 524 | GCTGCAGG GGCTAGCTACAACGA GAGGCTGG | 1878 |
| 1384 | GCAGCCUC A CCCCCCUG | 530 | CAGGGGGG GGCTAGCTACAACGA GAGGCTGC | 1879 |
| 22 | UGAAGAGG G CGUCCGCU | 547 | AGCGGACG GGCTAGCTACAACGA CCTCTTCA | 1880 |
| 24 | AAGAGGGC G UCCGCUGG | 548 | CCAGCGGA GGCTAGCTACAACGA GCCCTCTT | 1881 |
| 28 | GGGCGUCC G CUGGAGGG | 549 | CCCTCCAG GGCTAGCTACAACGA GGACGCCC | 1882 |
| 38 | UGGAGGGA G CCGGCUGC | 550 | GCAGCCGG GGCTAGCTACAACGA TCCCTCCA | 1883 |
| 42 | GGGAGCCG G CUGCUGGC | 551 | GCCAGCAG GGCTAGCTACAACGA CGGCTCCC | 1884 |
| 45 | AGCCGGCU G CUGGCAUG | 552 | CATGCCAG GGCTAGCTACAACGA AGCCGGCT | 1885 |
| 49 | GGCUGCUG G CAUGGGUG | 553 | CACCCATG GGCTAGCTACAACGA CAGCAGCC | 1886 |
| 55 | UGGCAUGG G UGCUGUGG | 554 | CCACAGCA GGCTAGCTACAACGA CCATGCCA | 1887 |
| 57 | GCAUGGGU G CUGUGGCU | 555 | AGCCACAG GGCTAGCTACAACGA ACCCATGC | 1888 |
| 60 | UGGGUGCU G UGGCUGCA | 556 | TGCAGCCA GGCTAGCTACAACGA AGCACCCA | 1889 |
| 63 | GUGCUGUG G CUGCAGGC | 557 | GCCTGCAG GGCTAGCTACAACGA CACAGCAC | 1890 |
| 66 | CUGUGGCU G CAGGCCUG | 558 | CAGGCCTG GGCTAGCTACAACGA AGCCACAG | 1891 |
| 70 | GGCUGCAG G CCUGGCAG | 559 | CTGCCAGG GGCTAGCTACAACGA CTGCAGCC | 1892 |
| 75 | CAGGCCUG G CAGGUGGC | 560 | GCCACCTG GGCTAGCTACAACGA CAGGCCTG | 1893 |
| 79 | CCUGGCAG G UGGCAGCC | 561 | GGCTGCCA GGCTAGCTACAACGA CTGCCAGG | 1894 |
| 82 | GGCAGGUG G CAGCCCCA | 562 | TGGGGCTG GGCTAGCTACAACGA CACCTGCC | 1895 |
| 85 | AGGUGGCA G CCCCAUGC | 563 | GCATGGGG GGCTAGCTACAACGA TGCCACCT | 1896 |
| 92 | AGCCCCAU G CCCAGGUG | 564 | CACCTGGG GGCTAGCTACAACGA ATGGGGCT | 1897 |
| 98 | AUGCCCAG G UGCCUGCG | 565 | CGCAGGCA GGCTAGCTACAACGA CTGGGCAT | 1898 |
| 100 | GCCCAGGU G CCUGCGUA | 566 | TACGCAGG GGCTAGCTACAACGA ACCTGGGC | 1899 |
| 104 | AGGUGCCU G CGUAUGCU | 567 | AGCATACG GGCTAGCTACAACGA AGGCACCT | 1900 |
| 106 | GUGCCUGC G UAUGCUAC | 568 | GTAGCATA GGCTAGCTACAACGA GCAGGCAC | 1901 |
| 110 | CUGCGUAU G CUACAAUG | 569 | CATTGTAG GGCTAGCTACAACGA ATACGCAG | 1902 |
| 120 | UACAAUGA G CCCAAGGU | 570 | ACCTTGGG GGCTAGCTACAACGA TCATTGTA | 1903 |
| 127 | AGCCCAAG G UGACGACA | 571 | TGTCGTCA GGCTAGCTACAACGA CTTGGGCT | 1904 |
| 137 | GACGACAA G CUGCCCCC | 572 | GGGGGCAG GGCTAGCTACAACGA TTGTCGTC | 1905 |
| 140 | GACAAGCU G CCCCCAGC | 573 | GCTGGGGG GGCTAGCTACAACGA AGCTTGTC | 1906 |
| 147 | UGCCCCCA G CAGGGCCU | 574 | AGGCCCTG GGCTAGCTACAACGA TGGGGGCA | 1907 |
| 152 | CCAGCAGG G CCUGCAGG | 575 | CCTGCAGG GGCTAGCTACAACGA CCTGCTGG | 1908 |
| 156 | CAGGGCCU G CAGGCUGU | 576 | ACAGCCTG GGCTAGCTACAACGA AGGCCCTG | 1909 |
| 160 | GCCUGCAG G CUGUGCCC | 577 | GGGCACAG GGCTAGCTACAACGA CTGCAGGC | 1910 |
| 163 | UGCAGGCU G UGCCCGUG | 578 | CACGGGCA GGCTAGCTACAACGA AGCCTGCA | 1911 |
| 165 | CAGGCUGU G CCCGUGGG | 579 | CCCACGGG GGCTAGCTACAACGA ACAGCCTG | 1912 |
| 169 | CUGUGCCC G UGGGCAUC | 580 | GATGCCCA GGCTAGCTACAACGA GGGCACAG | 1913 |
| 173 | GCCCGUGG G CAUCCCUG | 581 | CAGGGATG GGCTAGCTACAACGA CCACGGGC | 1914 |
| 181 | GCAUCCCU G CUGCCAGC | 582 | GCTGGCAG GGCTAGCTACAACGA AGGGATGC | 1915 |
| 184 | UCCCUGCU G CCAGCCAG | 583 | CTGGCTGG GGCTAGCTACAACGA AGCAGGGA | 1916 |
| 188 | UGCUGCCA G CCAGCGCA | 584 | TGCGCTGG GGCTAGCTACAACGA TGGCACCA | 1917 |
| 192 | CCCACCCA G CGCAUCUU | 585 | AAGATGCG GGCTAGCTACAACGA TGGCTGGC | 1918 |
| 194 | CAGCCAGC G CAUCUUCC | 586 | GGAAGATG GGCTAGCTACAACGA GCTGGCTG | 1919 |
| 204 | AUCUUCCU G CACGGCAA | 587 | TTGCCGTG GGCTAGCTACAACGA AGGAAGAT | 1920 |
| 209 | CCUGCACG G CAACCGCA | 588 | TGCGGTTG GGCTAGCTACAACGA CGTGCAGG | 1921 |
| 572 | CCUGCACG G CAACCCCA | 588 | TGCGGTTG GGCTAGCTACAACGA CGTGCAGG | 1922 |
| 215 | CGGCAACC G CAUCUCGC | 589 | GCGAGATG GGCTAGCTACAACGA GGTTGCCG | 1923 |
| 222 | CGCAUCUC G CAUGUGCC | 590 | GGCACATG GGCTAGCTACAACGA GAGATGCG | 1924 |
| 226 | UCUCGCAU G UGCCAGCU | 591 | AGCTGGCA GGCTAGCTACAACGA ATGCGAGA | 1925 |
| 228 | UCGCAUGU G CCAGCUGC | 592 | GCAGCTGG GGCTAGCTACAACGA ACATGCGA | 1926 |
| 232 | AUGUGCCA G CUGCCAGC | 593 | GCTGGCAG GGCTAGCTACAACGA TGGCACAT | 1927 |
| 235 | UGCCAGCU G CCAGCUUC | 594 | GAAGCTGG GGCTAGCTACAACGA AGCTGGCA | 1928 |
| 239 | AGCUGCCA G CUUCCGUG | 595 | CACGGAAG GGCTAGCTACAACGA TGGCAGCT | 1929 |
| 245 | CAGCUUCC G UGCCUGCC | 596 | GGCAGGCA GGCTAGCTACAACGA GGAAGCTG | 1930 |
| 247 | GCUUCCGU G CCUGCCGC | 597 | GCGGCAGG GGCTAGCTACAACGA ACGGAAGC | 1931 |
| 251 | CCGUGCCU G CCGCAACC | 598 | GGTTGCGG GGCTAGCTACAACGA AGGCACGG | 1932 |
| 254 | UGCCUGCC G CAACCUCA | 599 | TGAGGTTG GGCTAGCTACAACGA GGCAGGCA | 1933 |
| 270 | ACCAUCCU G UGGCUGCA | 600 | TGCAGCCA GGCTAGCTACAACGA AGGATGGT | 1934 |
| 273 | AUCCUGUG G CUGCACUC | 601 | CAGTGCAG GGCTAGCTACAACGA CACAGGAT | 1935 |
| 276 | CUGUGGCU G CACUCGAA | 602 | TTCGAGTG GGCTAGCTACAACGA AGCCACAG | 1936 |
| 286 | ACUCGAAU G UGCUGGCC | 603 | GGCCAGCA GGCTAGCTACAACGA ATTCGAGT | 1937 |
| 288 | UCGAAUGU G CUGGCCCG | 604 | CCGGCCAG GGCTAGCTACAACGA ACATTCGA | 1938 |
| 292 | AUGUGCUG G CCCGAAUU | 605 | AATTCGGG GGCTAGCTACAACGA CAGCACAT | 1939 |
| 304 | GAAUUGAU G CGGCUGCC | 606 | GGCAGCCG GGCTAGCTACAACGA ATCAATTC | 1940 |
| 307 | UUGAUGCG G CUGCCUUC | 607 | GAAGGCAG GGCTAGCTACAACGA CGCATCAA | 1941 |
| 310 | AUGCGGCU G CCUUCACU | 608 | AGTGAAGG GGCTAGCTACAACGA AGCCGCAT | 1942 |
| 320 | CUUCACUG G CCUGGCCC | 609 | GGGCCAGG GGCTAGCTACAACGA CAGTGAAG | 1943 |
| 325 | CUGGCCUG G CCCUCCUG | 610 | CAGGAGGG GGCTAGCTACAACGA CAGGCCAG | 1944 |
| 336 | CUCCUGGA G CAGCUGGA | 611 | TCCAGCTG GGCTAGCTACAACGA TCCAGGAG | 1945 |
| 339 | CUGGAGCA G CUGGACCU | 612 | AGGTCCAG GGCTAGCTACAACGA TGCTCCAG | 1946 |
| 350 | GGACCUCA G CGAUAAUG | 613 | CATTATCG GGCTAGCTACAACGA TGAGGTCC | 1947 |
| 358 | GCGAUAAU G CACAGCUC | 614 | GAGCTGTG GGCTAGCTACAACGA ATTATCGC | 1948 |
| 363 | AAUGCACA G CUCCGGUC | 615 | GACCGGAG GGCTAGCTACAACGA TGTGCATT | 1949 |
| 369 | CAGCUCCG G UCUGUGGA | 616 | TCCACAGA GGCTAGCTACAACGA CGGAGCTG | 1950 |
| 373 | UCCGGUCU G UGGACCCU | 617 | AGGGTCCA GGCTAGCTACAACGA AGACCGGA | 1951 |
| 382 | UGGACCCU G CCACAUUC | 618 | GAATGTGG GGCTAGCTACAACGA AGGGTCCA | 1952 |
| 395 | AUUCCACG G CCUGGGCC | 619 | GGCCCAGG GGCTAGCTACAACGA CGTGGAAT | 1953 |
| 401 | CGGCCUGG G CCGCCUAC | 620 | GTAGGCGG GGCTAGCTACAACGA CCAGGCCG | 1954 |
| 404 | CCUGGGCC G CCUACACA | 621 | TGTGTAGG GGCTAGCTACAACGA GGCCCAGG | 1955 |
| 414 | CUACACAC G CUGCACCU | 622 | AGGTGCAG GGCTAGCTACAACGA GTGTGTAG | 1956 |
| 417 | CACACGCU G CACCUGGA | 623 | TCCAGGTG GGCTAGCTACAACGA AGCGTGTG | 1957 |
| 428 | CCUGGACC G CUGCGGCC | 624 | GGCCGCAG GGCTAGCTACAACGA GGTCCAGG | 1958 |
| 431 | GGACCGCU G CGGCCUGC | 625 | GCAGGCCG GGCTAGCTACAACGA AGCGGTCC | 1959 |
| 434 | CCGCUGCG G CCUGCAGG | 626 | CCTGCAGG GGCTAGCTACAACGA CGCAGCGG | 1960 |
| 438 | UGCGGCCU G CAGGAGCU | 627 | AGCTCCTG GGCTAGCTACAACGA AGGCCGCA | 1961 |
| 444 | CUGCAGGA G CUGGGCCC | 628 | GGGCCCAG GGCTAGCTACAACGA TCCTGCAG | 1962 |
| 449 | GGAGCUGG G CCCGGGGC | 629 | GCCCCGGG GGCTAGCTACAACGA CCAGCTCC | 1963 |
| 456 | CGCCCGGG G CUGUUCCG | 630 | CGGAACAG GGCTAGCTACAACGA CCCGGGCC | 1964 |
| 459 | CCGGGGCU G UUCCGCGG | 631 | CCGCGGAA GGCTAGCTACAACGA AGCCCCGG | 1965 |
| 464 | GCUGUUCC G CGGCCUGG | 632 | CCAGGCCG GGCTAGCTACAACGA GGAACAGC | 1966 |
| 467 | GUUCCGCG G CCUGGCUG | 633 | CAGCCAGG GGCTAGCTACAACGA CGCGGAAC | 1967 |
| 472 | GCGGCCUG G CUGCCCUG | 634 | CAGGGCAG GGCTAGCTACAACGA CAGGCCGC | 1968 |
| 475 | GCCUGGCU G CCCUGCAG | 635 | CTGCAGGG GGCTAGCTACAACGA AGCCAGGC | 1969 |
| 480 | GCUGCCCU G CAGUACCU | 636 | AGGTACTG GGCTAGCTACAACGA AGGGCAGC | 1970 |
| 483 | GCCCUGCA G UACCUCUA | 637 | TAGAGGTA GGCTAGCTACAACGA TGCAGGGC | 1971 |
| 495 | CUCUACCU G CAGGACAA | 638 | TTGTCCTG GGCTAGCTACAACGA AGGTAGAG | 1972 |
| 505 | AGGACAAC G CGCUGCAG | 639 | CTGCAGCG GGCTAGCTACAACGA GTTGTCCT | 1973 |
| 507 | GACAACGC C CUGCAGGC | 640 | GCCTGCAG GGCTAGCTACAACGA GCGTTGTC | 1974 |
| 510 | AACGCGCU G CAGGCACU | 641 | AGTGCCTG GGCTAGCTACAACGA AGCGCGTT | 1975 |
| 514 | CGCUGCAG G CACUGCCU | 642 | AGGCAGTG GGCTAGCTACAACGA CTGCAGCG | 1976 |
| 519 | CAGGCACU G CCUGAUGA | 643 | TCATCAGG GGCTAGCTACAACGA AGTGCCTG | 1977 |
| 536 | CACCUUCC G CGACCUGG | 644 | CCAGGTCG GGCTAGCTACAACGA GGAAGGTG | 1978 |
| 545 | CGACCUGG G CAACCUCA | 645 | TGAGGTTG GGCTAGCTACAACGA CCACGTCG | 1979 |
| 567 | CUCUUCCU G CACGGCAA | 646 | TTGCCGTG GGCTAGCTACAACGA AGGAAGAG | 1980 |
| 578 | CGGCAACC G CAUCUCCA | 647 | TGGAGATG GGCTAGCTACAACGA GGTTGCCG | 1981 |
| 587 | CAUCUCCA G CGUGCCCG | 648 | CGGGCACG GGCTAGCTACAACGA TGGAGATG | 1982 |
| 589 | UCUCCAGC G UGCCCGAG | 649 | CTCGGGCA GGCTAGCTACAACGA GCTGGAGA | 1983 |
| 591 | UCCAGCGU G CCCGAGCG | 650 | CGCTCGGG GGCTAGCTACAACGA ACGCTGGA | 1984 |
| 597 | GUGCCCGA G CGCGCCUU | 651 | AAGGCGCG GGCTAGCTACAACGA TCGGGCAC | 1985 |
| 599 | GCCCGAGC G CGCCUUCC | 652 | GGAAGGCG GGCTAGCTACAACGA GCTCGGGC | 1986 |
| 601 | CCGAGCGC G CCUUCCGU | 653 | ACGGAAGG GGCTAGCTACAACGA GCGCTCGG | 1987 |
| 608 | CGCCUUCC G UGGGCUGC | 654 | GCAGCCCA GGCTAGCTACAACGA GGAAGGCG | 1988 |
| 612 | UUCCGUGG G CUGCACAG | 655 | CTGTGCAG GGCTAGCTACAACGA CCACGCAA | 1989 |
| 615 | CGUGGGCU G CACAGCCU | 656 | AGGCTGTG GGCTAGCTACAACGA AGCCCACG | 1990 |
| 620 | GCUGCACA G CCUCGACC | 657 | GGTCGAGG GGCTAGCTACAACGA TGTGCAGC | 1991 |
| 629 | CCUCGACC G UCUCCUAC | 658 | GTAGGAGA GGCTAGCTACAACGA GGTCGAGG | 1992 |
| 639 | CUCCUACU G CACCAGAA | 659 | TTCTGGTG GGCTAGCTACAACGA AGTAGGAG | 1993 |
| 650 | CCAGAACC G CGUGGCCC | 660 | GGGCCACG GGCTAGCTACAACGA GGTTCTGG | 1994 |
| 652 | AGAACCGC G UGGCCCAU | 661 | ATGGGCCA GGCTAGCTACAACGA GCGGTTCT | 1995 |
| 655 | ACCGCGUG G CCCAUGUG | 662 | CACATGGG GGCTAGCTACAACGA CACGCGGT | 1996 |
| 661 | UGGCCCAU G UGCACCCG | 663 | CGGGTGCA GGCTAGCTACAACGA ATGGGCCA | 1997 |
| 663 | GCCCAUGU G CACCCGCA | 664 | TGCGGGTG GGCTAGCTACAACGA ACATGGGC | 1998 |
| 669 | GUGCACCC G CAUGCCUU | 665 | AAGGCATG GGCTAGCTACAACGA GCGTGCAC | 1999 |
| 673 | ACCCGCAU G CCUUCCGU | 666 | ACGGAAGG GGCTAGCTACAACGA ATGCGGGT | 2000 |
| 680 | UGCCUUCC G UGACCUUG | 667 | CAAGGTCA GGCTAGCTACAACGA GGAAGGCA | 2001 |
| 689 | UGACCUUG G CCGCCUCA | 668 | TGAGGCGG GGCTAGCTACAACGA CAAGGTCA | 2002 |
| 692 | CCUUGGCC G CCUCAUGA | 669 | TCATGAGG GGCTAGCTACAACGA GGCCAAGG | 2003 |
| 711 | CUCUAUCU G UUUGCCAA | 670 | TTGGCAAA GGCTAGCTACAACGA AGATAGAG | 2004 |
| 715 | AUCUGUUU G CCAACAAU | 671 | ATTGTTGG GGCTAGCTACAACGA AAACAGAT | 2005 |
| 730 | AUCUAUCA G CGCUGCCC | 672 | GGGCAGCG GGCTAGCTACAACGA TCATAGAT | 2006 |
| 732 | CUAUCAGC G CUGCCCAC | 673 | GTGGGCAG GGCTAGCTACAACGA GCTGATAG | 2007 |
| 735 | UCAGCGCU G CCCACUGA | 674 | TCAGTGGG GGCTAGCTACAACGA AGCGCTGA | 2008 |
| 745 | CCACUGAG G CCCUGGCC | 675 | GGCCAGGG GGCTAGCTACAACGA CTCAGTGG | 2009 |
| 751 | AGGCCCUG G CCCCCCUG | 676 | CAGGGGGG GGCTAGCTACAACGA CAGGGCCT | 2010 |
| 759 | GCCCCCCU G CGUGCCCU | 677 | AGGGCACG GGCTAGCTACAACGA AGGGGGGC | 2011 |
| 761 | CCCCCUGC G UGCCCUGC | 678 | GCAGGGCA GGCTAGCTACAACGA GCAGGGGG | 2012 |
| 763 | CCCUGCGU G CCCUGCAG | 679 | CTGCAGGG GGCTAGCTACAACGA ACGCAGGG | 2013 |
| 768 | CGUGCCCU G CAGUACCU | 680 | AGGTACTG GGCTAGCTACAACGA AGGGCACG | 2014 |
| 771 | GCCCUGCA G UACCUGAG | 681 | CTCAGGTA GGCTAGCTACAACGA TGCAGGGC | 2015 |
| 780 | UACCUGAG G CUCAACGA | 682 | TCGTTGAG GGCTAGCTACAACGA CTCAGGTA | 2016 |
| 799 | ACCCCUGG G UGUGUGAC | 683 | GTCACACA GGCTAGCTACAACGA CCAGGGGT | 2017 |
| 801 | CCCUGGGU G UGUGACUG | 684 | CAGTCACA GGCTAGCTACAACGA ACCCAGGG | 2018 |
| 803 | CUGGGUGU G UGACUGCC | 685 | GGCAGTCA GGCTAGCTACAACGA ACACCCAG | 2019 |
| 809 | GUGUGACU G CCGGGCAC | 686 | GTGCCCGG GGCTAGCTACAACGA AGTCACAC | 2020 |
| 814 | ACUGCCGG G CACGCCCA | 687 | TGGGCGTG GGCTAGCTACAACGA CCGGCAGT | 2021 |
| 818 | CCGGGCAC G CCCACUCU | 688 | AGAGTGGG GGCTAGCTACAACGA GTGCCCGG | 2022 |
| 829 | CACUCUGG G CCUGGCUG | 689 | CAGCCAGG GGCTAGCTACAACGA CCAGAGTG | 2023 |
| 834 | UGGGCCUG G CUGCAGAA | 690 | TTCTGCAG GGCTAGCTACAACGA CAGGCCCA | 2024 |
| 837 | GCCUGGCU G CAGAAGUU | 691 | AACTTCTG GGCTAGCTACAACGA AGCCAGGC | 2025 |
| 843 | CUGCAGAA G UUCCGCGG | 692 | CCGCGGAA GGCTAGCTACAACGA TTCTGCAG | 2026 |
| 848 | GAAGUUCC G CGGCUCCU | 693 | AGGAGCCG GGCTAGCTACAACGA GGAACTTC | 2027 |
| 851 | GUUCCGCG G CUCCUCCU | 694 | AGGAGGAG GGCTAGCTACAACGA CGCGGAAC | 2028 |
| 865 | CCUCCGAG G UGCCCUGC | 695 | GCAGGGCA GGCTAGCTACAACGA CTCGGAGG | 2029 |
| 867 | UCCGAGGU G CCCUGCAG | 696 | CTGCAGGG GGCTAGCTACAACGA ACCTCGGA | 2030 |
| 872 | GGUGCCCU G CAGCCUCC | 697 | GGAGGCTG GGCTAGCTACAACGA AGGGCACC | 2031 |
| 875 | GCCCUGCA G CCUCCCGC | 698 | GCGGGAGG GGCTAGCTACAACGA TGCAUGGC | 2032 |
| 882 | AGCCUCCC G CAACGCCU | 699 | AGGCGTTG GGCTAGCTACAACGA GGGAGGCT | 2033 |
| 887 | CCCGCAAC G CCUGGCUG | 700 | CAGCCAGG GGCTAGCTACAACGA GTTGCGGG | 2034 |
| 892 | AACGCCUG G CUGGCCGU | 701 | ACGGCCAG GGCTAGCTACAACGA CAGGCGTT | 2035 |
| 896 | CCUGGCUG G CCGUGACC | 702 | GGTCACGG GGCTAGCTACAACGA CAGCCAGG | 2036 |
| 899 | GGCUGGCC G UGACCUCA | 703 | TGAGGTCA GGCTAGCTACAACGA GGCCAGCC | 2037 |
| 911 | CCUCAAAC G CCUAGCUG | 704 | CAGCTAGG GGCTAGCTACAACGA GTTTGUAGG | 2038 |
| 916 | AACGCCUA G CUGCCAAU | 705 | ATTGGCAG GGCTAGCTACAACGA TAGGCGTT | 2039 |
| 919 | GCCUAGCU G CCAAUGAC | 706 | GTCATTGG GGCTAGCTACAACGA AGCTAGGC | 2040 |
| 930 | AAUGACCU G CAGGGCUG | 707 | CAGCCCTG GGCTAGCTACAACGA AGGTCATT | 2041 |
| 935 | CCUGCAGG G CUGCGCUG | 708 | CAGCGCAG GGCTAGCTACAACGA CCTGCAGG | 2042 |
| 938 | GCAGGGCU G CGCUGUGG | 709 | CCACAGCG GGCTAGCTACAACGA AGCCCTGC | 2043 |
| 940 | AGGGCUGC G CUGUGGCC | 710 | GGCCACAG GGCTAGCTACAACGA GCAGCCCT | 2044 |
| 943 | GCUGCGCU G UGGCCACC | 711 | GGTGGCCA GGCTAGCTACAACGA AGCGCAGC | 2045 |
| 946 | GCGCUGUG G CCACCGGC | 712 | GCCGGTGG GGCTAGCTACAACGA CACAGCGC | 2046 |
| 953 | GGCCACCG G CCCUUACC | 713 | GGTAAGGG GGCTAGCTACAACGA CGGTGGCC | 2047 |
| 977 | CUGGACCG G CAGGGCCA | 714 | TGGCCCTG GGCTAGCTACAACGA CGGTCCAG | 2048 |
| 982 | CCGGCAGG G CCACCGAU | 715 | ATCGGTGG GGCTAGCTACAACGA CCTGCCGG | 2049 |
| 996 | GAUGAGGA G CCGCUGGG | 716 | CCCAGCGG GGCTAGCTACAACGA TCCTCATC | 2050 |
| 999 | GAGGAGCC G CUGGGGCU | 717 | AGCCCCAG GGCTAGCTACAACGA GGCTCCTC | 2051 |
| 1005 | CCGCUGGG G CUUCCCAA | 718 | TTGGGAAG GGCTAGCTACAACGA CCCAGCGG | 2052 |
| 1014 | CUUCCCAA G UGCUGCCA | 719 | TGGCAGCA GGCTAGCTACAACGA TTGGGAAG | 2053 |
| 1016 | UCCCAAGU G CUGCCAGC | 720 | GCTGGCAG GGCTAGCTACAACGA ACTTGGGA | 2054 |
| 1019 | CAAGUGCU G CCAGCCAG | 721 | CTGGCTGG GGCTAGCTACAACGA AGCACTTG | 2055 |
| 1023 | UGCUGCCA G CCAGAUGC | 722 | GCATCTGG GGCTAGCTACAACGA TGGCAGCA | 2056 |
| 1030 | AGCCAGAU G CCGCUGAC | 723 | GTCAGCGG GGCTAGCTACAACGA ATCTGGCT | 2057 |
| 1033 | CAGAUGCC G CUGACAAG | 724 | CTTGTCAG GGCTAGCTACAACGA GGCATCTG | 2058 |
| 1042 | CUGACAAG G CCUCAGUA | 725 | TACTGAGG GGCTAGCTACAACGA CTTGTCAG | 2059 |
| 1048 | AGGCCUCA G UACUGGAG | 726 | CTCCAGTA GGCTAGCTACAACGA TGAGGCCT | 2060 |
| 1056 | GUACUGGA G CCUGGAAG | 727 | CTTCCAGG GGCTAGCTACAACGA TCCAGTAC | 2061 |
| 1069 | GAAGACCA G CUUCGGCA | 728 | TGCCGAAG GGCTAGCTACAACGA TGGTCTTC | 2062 |
| 1075 | CAGCUUCG G CAGGCAAU | 729 | ATTGCCTG GGCTAGCTACAACGA CGAAGCTG | 2063 |
| 1079 | UUCGGCAG G CAAUGCGC | 730 | GCGCATTG GGCTAGCTACAACGA CTGCCGAA | 2064 |
| 1084 | CAGGCAAU G CGCUGAAG | 731 | CTTCAGCG GGCTAGCTACAACGA ATTGCCTG | 2065 |
| 1086 | GGCAAUGC G CUGAAGGG | 732 | CCCTTCAG GGCTAGCTACAACGA GCATTGCC | 2066 |
| 1097 | GAAGGGAC G CGUGCCGC | 733 | GCGGCACG GGCTAGCTACAACGA GTCCCTTC | 2067 |
| 1099 | AGGGACGC G UGCCGCCC | 734 | GGGCGGCA GGCTAGCTACAACGA GCGTCCCT | 2068 |
| 1101 | GGACGCGU G CCGCCCGG | 735 | CCGGGCGG GGCTAGCTACAACGA ACGCGTCC | 2069 |
| 1104 | CGCGUGCC G CCCGGUGA | 736 | TCACCGGG GGCTAGCTACAACGA GGCACGCG | 2070 |
| 1109 | GCCGCCCG G UGACAGCC | 737 | GGCTGTCA GGCTAGCTACAACGA CGGGCGGC | 2071 |
| 1115 | CGGUGACA G CCCGCCGG | 738 | CCGGCGGG GGCTAGCTACAACGA TGTCACCG | 2072 |
| 1119 | GACAGCCC G CCGGGCAA | 739 | TTGCCCGG GGCTAGCTACAACGA GGGCTGTC | 2073 |
| 1124 | CCCGCCGG G CAACGGCU | 740 | AGCCGTTG GGCTAGCTACAACGA CCGGCGGG | 2074 |
| 1130 | GGGCAACG G CUCUCGCC | 741 | GGCCAGAG GGCTAGCTACAACGA CCTTCCCC | 2075 |
| 1136 | CGGCUCUG G CCCACGGC | 742 | GCCGTGGG GGCTAGCTACAACGA CAGAGCCG | 2076 |
| 1143 | GGCCCACG G CACAUCAA | 743 | TTGATGTG GGCTAGCTACAACGA CGTGGGCC | 2077 |
| 1173 | GGGACUCU G CCUGGCUC | 744 | GAGCCAGG GGCTAGCTACAACGA AGAGTCCC | 2078 |
| 1178 | UCUGCCUG G CUCUGCUG | 745 | CAGCAGAG GGCTAGCTACAACGA CAGGCAGA | 2079 |
| 1183 | CUGGCUCU G CUGAGCCC | 746 | GGGCTCAG GGCTAGCTACAACGA AGAGCCAG | 2080 |
| 1188 | UCUGCUGA G CCCCCGCU | 747 | AGCGGGGG GGCTAGCTACAACGA TCAGCAGA | 2081 |
| 1194 | GAGCCCCC G CUCACUGC | 748 | GCAGTGAG GGCTAGCTACAACGA GGGGGCTC | 2082 |
| 1201 | CGCUCACU G CAGUGCGG | 749 | CCGCACTG GGCTAGCTACAACGA AGTGAGCG | 2083 |
| 1204 | UCACUGCA G UGCGGCCC | 750 | GGGCCGCA GGCTAGCTACAACGA TGCAGTGA | 2084 |
| 1206 | ACUGCAGU G CGGCCCGA | 751 | TCGGGCCG GGCTAGCTACAACGA ACTGCAGT | 2085 |
| 1209 | GCACUGCG G CCCGAGCG | 752 | CCCTCGCG GGCTAGCTACAACGA CGCACTGC | 2086 |
| 1217 | GCCCCAGG G CUCCGAGC | 753 | CCTCGCAG GGCTAGCTACAACGA CCTCGGCC | 2087 |
| 1224 | GCCUCCCA G CCACCAGC | 754 | CCTGGTGC GGCTAGCTACAACGA TCGGAGCC | 2088 |
| 1233 | CCACCAGG G UUCCCCAC | 755 | GTCGGCAA GGCTAGCTACAACGA CCTCGTGC | 2089 |
| 1247 | CACCUCGG G CCCUCGCC | 756 | CGCGACCG GGCTAGCTACAACGA CCGAGCTC | 2090 |
| 1253 | CGCCCCUC G CCGCAGGC | 757 | CCCTCCGC GGCTAGCTACAACGA CACCCCCC | 2091 |
| 1260 | CGCCCGAC G CCAGCCUG | 758 | CACCCTCG GGCTAGCTACAACGA CTCCCGCG | 2092 |
| 1265 | CAGCCCAG G CUGUUCAC | 759 | GTGAACAG GGCTAGCTACAACGA CTCGCCTC | 2093 |
| 1268 | CCCACGCU G UUCACGCA | 760 | TGCGTCAA GGCTAGCTACAACGA ACCCTGCC | 2094 |
| 1274 | CUCUUCAC G CAACAACC | 761 | GGTTCTTG GGCTAGCTACAACGA GTGAACAG | 2095 |
| 1283 | CAAGAACC G CACCCGCA | 762 | TGCGGGTG GGCTAGCTACAACGA CGTTCTTC | 2096 |
| 1289 | CCCCACCC G CAGCCACU | 763 | AGTGGCTC GGCTAGCTACAACGA CCCTCCCC | 2097 |
| 1292 | CACCCCCA G CCACUGCC | 764 | GCCAGTGG GGCTAGCTACAACGA TGCGGGTG | 2098 |
| 1298 | CAGCCACU G CCGUCUGG | 765 | CCAGACGC GGCTAGCTACAACGA ACTGGCTG | 2099 |
| 1301 | CCACUGCC G UCUCCGCC | 766 | CCCCCAGA GGCTAGCTACAACGA CGCACTCG | 2100 |
| 1307 | CCGUCUGG G CCAGGCAG | 767 | CTGCCTCG GGCTAGCTACAACGA CCAGACGG | 2101 |
| 1312 | UCCGCCAC G CACCCACC | 768 | GCTGCCTG GGCTAGCTACAACGA CTGGCCCA | 2102 |
| 1316 | CCACCCAC G CACCGCGC | 769 | CCCCGCTG GGCTAGCTACAACGA CTGCCTCG | 2103 |
| 1319 | GCCACCCA G CGCGCGUG | 770 | CACCCCCC GGCTAGCTACAACGA TGCCTCCC | 2104 |
| 1325 | CAGCCCCG G UGGCCGGA | 771 | TCCCGCCA GGCTAGCTACAACGA CCCCCCTG | 2105 |
| 1328 | CGGGGGUG G CCGCACUC | 772 | CAGTCCCG GGCTAGCTACAACGA CACCCCCG | 2106 |
| 1337 | CCGGACUG G UGACUCAG | 773 | CTGAGTCA GGCTAGCTACAACGA CAGTCCCC | 2107 |
| 1349 | CUCACAAC G CUCAGGUG | 774 | CACCTGAG GGCTAGCTACAACGA CTTCTGAG | 2108 |
| 1355 | AGGCUCAC G UGCCCUAC | 775 | CTAGGCCA GGCTAGCTACAACGA CTCACCCT | 2109 |
| 1357 | CCUCACGU G CCCUACCC | 776 | CCGTAGGG GGCTAGCTACAACGA ACCTCACC | 2110 |
| 1367 | CCUACCCA G CCUCACCU | 777 | ACGTGACG GGCTAGCTACAACGA TGCGTACC | 2111 |
| 1376 | CCUCACCU G CAGCCUCA | 778 | TCAGGCTG GGCTAGCTACAACGA AGCTCACC | 2112 |
| 1379 | CACCUCCA G CCUCACCC | 779 | CCGTGAGG GGCTAGCTACAACGA TCCACCTC | 2113 |
| 1394 | CCCCCUGC G CCUCCCGC | 780 | CCGCCAGG GGCTAGCTACAACGA CCACCGGC | 2114 |
| 1399 | UCCCCCUC G CCCUGCUG | 781 | CACCAGCC GGCTAGCTACAACGA CAGGCCCA | 2115 |
| 1401 | CCCCUCGC G CUGGUGCU | 782 | ACCACCAC GGCTAGCTACAACGA CCCACGCC | 2116 |
| 1405 | UCCCCCUC G UCCUCUCC | 783 | CCACACCA GGCTAGCTACAACGA CACCCCCA | 2117 |
| 1407 | GCGCUGGU G CUGUGGAC | 784 | GTCCACAG GGCTAGCTACAACGA ACCAGCGC | 2118 |
| 1410 | CUGGUGCU G UGGACAGU | 785 | ACTGTCCA GGCTAGCTACAACGA AGCACCAG | 2119 |
| 1417 | UGUGGACA G UGCUUGGG | 786 | CCCAAGCA GGCTAGCTACAACGA TGTCCACA | 2120 |
| 1419 | UGGACAGU G CUUGGGCC | 787 | GGCCCAAG GGCTAGCTACAACGA ACTGTCCA | 2121 |
| 1425 | GUGCUUGG G CCCUGCUG | 788 | CAGCAGGG GGCTAGCTACAACGA CCAAGCAC | 2122 |
| 1430 | UGGGCCCU G CUGACCCC | 789 | GGGGTCAG GGCTAGCTACAACGA AGGGCCCA | 2123 |
| 13 | CCCCUACG A UGAAGAGG | 790 | CCTCTTCA GGCTAGCTACAACGA CGTAGGGG | 2124 |
| 116 | AUGCUACA A UGAGCCCA | 791 | TGGGCTCA GGCTAGCTACAACGA TGTAGCAT | 2125 |
| 130 | CCAAGGUG A CGACAAGC | 792 | GCTTGTCG GGCTAGCTACAACGA CACCTTGG | 2126 |
| 133 | AGGUGACG A CAAGCUGC | 793 | GCAGCTTG GGCTAGCTACAACGA CGTCACCT | 2127 |
| 212 | GCACGGCA A CCGCAUCU | 794 | AGATGCGG GGCTAGCTACAACGA TGCCGTGC | 2128 |
| 575 | GCACGGCA A CCGCAUCU | 794 | AGATGCGG GGCTAGCTACAACGA TGCCGTGC | 2129 |
| 257 | CUGCCGCA A CCUCACCA | 795 | TGGTGAGG GGCTAGCTACAACGA TGCGGCAG | 2130 |
| 284 | GCACUCGA A UGUGCUGG | 796 | CCAGCACA GGCTAGCTACAACGA TCGAGTGC | 2131 |
| 298 | UGGCCCGA A UUGAUGCG | 797 | CGCATCAA GGCTAGCTACAACGA TCGGGCCA | 2132 |
| 302 | CCGAAUUG A UGCGGCUG | 798 | CAGCCGCA GGCTAGCTACAACGA CAATTCGG | 2133 |
| 344 | GCAGCUGG A CCUCAGCG | 799 | CGCTGAGG GGCTAGCTACAACGA CCAGCTGC | 2134 |
| 353 | CCUCAGCG A UAAUGCAC | 800 | GTGCATTA GGCTAGCTACAACGA CGCTGAGG | 2135 |
| 356 | CAGCGAUA A UGCACAGC | 801 | GCTGTGCA GGCTAGCTACAACGA TATCGCTG | 2136 |
| 377 | GUCUGUGG A CCCUGCCA | 802 | TGGCAGGG GGCTAGCTACAACGA CCACAGAC | 2137 |
| 425 | GCACCUGG A CCGCUGCG | 803 | CGCAGCGG GGCTAGCTACAACGA CCAGGTGC | 2138 |
| 500 | CCUGCAGG A CAACGCGC | 804 | GCGCGTTG GGCTAGCTACAACGA CCTGCAGG | 2139 |
| 503 | GCAGGACA A CGCGCUGC | 805 | GCAGCGCG GGCTAGCTACAACGA TGTCCTGC | 2140 |
| 524 | ACUGCCUG A UGACACCU | 806 | AGGTGTCA GGCTAGCTACAACGA CAGGCAGT | 2141 |
| 527 | GCCUGAUG A CACCUUCC | 807 | GGAAGGTG GGCTAGCTACAACGA CATCAGGC | 2142 |
| 539 | CUUCCGCG A CCUGGGCA | 808 | TGCCCAGG GGCTAGCTACAACGA CGCGGAAG | 2143 |
| 548 | CCUGGGCA A CCUCACAC | 809 | GTGTGAGG GGCTAGCTACAACGA TGCCCAGG | 2144 |
| 626 | CAGCCUCG A CCGUCUCC | 810 | GGAGACGG GGCTAGCTACAACGA CGAGGCTG | 2145 |
| 647 | GCACCAGA A CCGCGUGG | 811 | CCACGCGG GGCTAGCTACAACGA TCTGGTGC | 2146 |
| 683 | CUUCCGUG A CCUUGGCC | 812 | GGCCAAGG GGCTAGCTACAACGA CACGGAAG | 2147 |
| 700 | GCCUCAUG A CACUCUAU | 813 | ATAGAGTG GGCTAGCTACAACGA CATGAGGC | 2148 |
| 719 | GUUUGCCA A CAAUCUAU | 814 | ATAGATTG GGCTAGCTACAACGA TGGCAAAC | 2149 |
| 722 | UGCCAACA A UCUAUCAG | 815 | CTGATAGA GGCTAGCTACAACGA TGTTGGCA | 2150 |
| 785 | GAGGCUCA A CGACAACC | 816 | GGTTGTCG GGCTAGCTACAACGA TGAGCCTC | 2151 |
| 788 | GCUCAACG A CAACCCCU | 817 | AGGGGTTG GGCTAGCTACAACGA CGTTGAGC | 2152 |
| 791 | CAACGACA A CCCCUGGG | 818 | CCCAGGGG GGCTAGCTACAACGA TGTCGTTG | 2153 |
| 806 | GGUGUGUG A CUGCCGGG | 819 | CCCGGCAG GGCTAGCTACAACGA CACACACC | 2154 |
| 885 | CUCCCGCA A CGCCUGGC | 820 | GCCAGGCG GGCTAGCTACAACGA TGCGGGAG | 2155 |
| 902 | UGGCCGUG A CCUCAAAC | 821 | GTTTGAGG GGCTAGCTACAACGA CACGGCCA | 2156 |
| 909 | GACCUCAA A CGCCUAGC | 822 | GCTAGGCG GGCTAGCTACAACGA TTGAGGTC | 2157 |
| 923 | AGCUGCCA A UGACCUGC | 823 | GCAGGTCA GGCTAGCTACAACGA TGGCAGCT | 2158 |
| 926 | UGCCAAUG A CCUGCAGG | 824 | CCTGCAGG GGCTAGCTACAACGA CATTGGCA | 2159 |
| 973 | CCAUCUGG A CCGGCAGG | 825 | CCTGCCGG GGCTAGCTACAACGA CCAGATGG | 2160 |
| 989 | GGCCACCG A UGAGGAGC | 826 | GCTCCTCA GGCTAGCTACAACGA CGGTGGCC | 2161 |
| 1028 | CCAGCCAG A UGCCGCUG | 827 | CAGCGGCA GGCTAGCTACAACGA CTGGCTGG | 2162 |
| 1037 | UGCCGCUG A CAAGGCCU | 828 | AGGCCTTG GGCTAGCTACAACGA CAGCGGCA | 2163 |
| 1065 | CCUGGAAG A CCAGCUUC | 829 | GAAGCTGG GGCTAGCTACAACGA CTTCCAGG | 2164 |
| 1082 | GGCAGGCA A UGCGCUGA | 830 | TCAGCGCA GGCTAGCTACAACGA TGCCTGCC | 2165 |
| 1095 | CUGAAGGG A CGCGUGCC | 831 | GGCACGCG GGCTAGCTACAACGA CCCTTCAG | 2166 |
| 1112 | GCCCGGUG A CAGCCCGC | 832 | GCGGGCTG GGCTAGCTACAACGA CACCGGGC | 2167 |
| 1127 | GCCGGGCA A CGGCUCUG | 833 | CAGAGCCG GGCTAGCTACAACGA TGCCCGGC | 2168 |
| 1151 | GCACAUCA A UGACUCAC | 834 | GTGAGTCA GGCTAGCTACAACGA TGATGTGC | 2169 |
| 1154 | CAUCAAUG A CUCACCCU | 835 | AGGGTGAG GGCTAGCTACAACGA CATTGATG | 2170 |
| 1168 | CCUUUGGG A CUCUGCCU | 836 | AGGCAGAG GGCTAGCTACAACGA CCCAAAGG | 2171 |
| 1280 | ACGCAAGA A CCGCACCC | 837 | GGGTGCGG GGCTAGCTACAACGA TCTTGCGT | 2172 |
| 1333 | CUGGCGGG A CUGGUGAC | 838 | GTCACCAG GGCTAGCTACAACGA CCCGCCAC | 2173 |
| 1340 | GACUGGUG A CUCAGAAG | 839 | CTTCTGAG GGCTAGCTACAACGA CACCAGTC | 2174 |
| 1414 | UGCUGUGG A CAGUGCUU | 840 | AAGCACTG GGCTAGCTACAACGA CCACAGCA | 2175 |

Input Sequence = AF283463.
Cut Site = R/Y
Arm Length = 8.
Core Sequence = GGCTAGCTACAACGA
AF283463 (Homo sapiens Nogo receptor mRNA, complete cds.; 1441 bp)

[0185] TABLE VII

Human NOGO Receptor Amberzyme Ribozyme and Substrate Sequence

| | | | | |
|---|---|---|---|---|
| | | Seq | | Rz Seq |
| Pos | Substrate | ID | Ribozyme | ID |

| | | | | |
|---|---|---|---|---|
| 22 | UGAAGAGG G CGUCCGCU | 547 | AGCGGACG GGAGGAAACUCC CU UCAAGGACAUCGUCCGGG CCUCUUCA | 2176 |
| 24 | AAGAGGGC G UCCGCUGG | 548 | CCAGCGGA GGAGGAAACUCC CU UCAAGGACAUCGUCCGGG GCCCUCUU | 2177 |
| 28 | GGGCGUCC G CUGGAGGG | 549 | CCCUCCAG GGAGGAAACUCC CU UCAAGGACAUCGUCCGGG GGACGCCC | 2178 |
| 38 | UGGAGGGA G CCGGCUGC | 550 | GCAGCCGG GGAGGAAACUCC CU UCAAGGACAUCGUCCGGG UCCCUCCA | 2179 |
| 42 | GGGAGCCG G CUGCUGGC | 551 | GCCAGCAG GGAGGAAACUCC CU UCAAGGACAUCGUCCGGG CGGCUCCC | 2180 |
| 45 | AGCCGGCU G CUGGCAUG | 552 | CAUGCCAG GGAGGAAACUCC CU UCAAGGACAUCGUCCGGG AGCCGGCU | 2181 |
| 49 | GGCUGCUG G CAUGGGUG | 553 | CACCCAUG GGAGGAAACUCC CU UCAAGGACAUCGUCCGGG CAGCAGCC | 2182 |
| 55 | UGGCAUGG G UGCUGUGG | 554 | CCACAGCA GGAGGAAACUCC CU UCAAGGACAUCGUCCGGG CCAUGCCA | 2183 |
| 57 | GCAUGGGU G CUGUGGCU | 555 | AGCCACAG GGAGGAAACUCC CU UCAAGGACAUCGUCCGGG ACCCAUGC | 2184 |
| 60 | UGGGUGCU G UGGCUGCA | 556 | UGCAGCCA GGAGGAAACUCC CU UCAAGGACAUCGUCCGGG AGCACCCA | 2185 |
| 63 | GUGCUGUG G CUGCAGGC | 557 | GCCUGCAG GGAGGAAACUCC CU UCAAGGACAUCGUCCGGG CACAGCAC | 2186 |
| 66 | CUGUGGCU G CAGGCCUG | 558 | CAGGCCUG GGAGGAAACUCC CU UCAAGGACAUCGUCCGGG AGCCACAG | 2187 |
| 70 | GGCUGCAG G CCUGGCAG | 559 | CUGCCAGG GGAGGAAACUCC CU UCAAGGACAUCGUCCGGG CUGCAGCC | 2188 |
| 75 | CAGGCCUG G CAGGUGGC | 560 | GCCACCUG GGAGGAAACUCC CU UCAAGGACAUCGUCCGGG CAGGCCUG | 2189 |
| 79 | CCUGGCAG G UGGCAGCC | 561 | GGCUGCCA GGAGGAAACUCC CU UCAAGGACAUCGUCCGGG CUGCCAGG | 2190 |
| 82 | GGCAGGUG G CAGCCCCA | 562 | UGGGGCUG GGAGGAAACUCC CU UCAAGGACAUCGUCCGGG CACCUGCC | 2191 |
| 85 | AGGUGGCA G CCCCAUGC | 563 | GCAUGGGG GGAGGAAACUCC CU UCAAGGACAUCGUCCGGG UGCCACCU | 2192 |
| 92 | AGCCCCAU G CCCAGGUG | 564 | CACCUGGG GGAGGAAACUCC CU UCAAGGACAUCGUCCGGG AUGGGGCU | 2193 |
| 98 | AUGCCCAG G UGCCUGCG | 565 | CGCAGGCA GGAGGAAACUCC CU UCAAGGACAUCGUCCGGG CUGGGCAU | 2194 |
| 100 | GCCCAGGU G CCUGCGUA | 566 | UACGCAGG GGAGGAAACUCC CU UCAAGGACAUCGUCCGGG ACCUGGGC | 2195 |
| 104 | AGGUGCCU G CGUAUGCU | 567 | AGCAUACG GGAGGAAACUCC CU UCAAGGACAUCGUCCGGG AGGCACCU | 2196 |
| 106 | GUGCCUGC G UAUGCUAC | 568 | GUAGCAUA GGAGGAAACUCC CU UCAAGGACAUCGUCCGGG GCAGGCAC | 2197 |
| 110 | CUGCGUAU G CUACAAUG | 569 | CAUUGUAG GGAGGAAACUCC CU UCAAGGACAUCGUCCGGG AUACGCAG | 2198 |
| 120 | UACAAUGA G CCCAAGGU | 570 | ACCUUGGG GGAGGAAACUCC CU UCAAGGACAUCGUCCGGG UCAUUGUA | 2199 |
| 127 | AGCCCAAG 0 UGACGACA | 571 | UGUCGUCA GGAGGAAACUCC CU UCAAGGACAUCGUCCGGG CUUGGGCU | 2200 |
| 137 | GACGACAA G CUGCCCCC | 572 | GGGGGCAG GGAGGAAACUCC CU UCAAGGACAUCGUCCGGG UUGUCGUC | 2201 |
| 140 | GACAAGCU G CCCCCAGC | 573 | GCUGGGGG GGAGGAAACUCC CU UCAAGGACAUCGUCCGGG AGCUUGUC | 2202 |
| 147 | UGCCCCCA C CAGGGCCU | 574 | AGGCCCUG GGAGGAAACUCC CU UCAAGGACAUCGUCCGGG UGGGGGCA | 2203 |
| 152 | CCAGCAGG G CCUGCAGG | 575 | CCUGCAGG GGAGGAAACUCC CU UCAAGGACAUCGUCCGGG CCUGCUGG | 2204 |
| 156 | CAGGGCCU G CAGGCUGU | 576 | ACAGCCUG GGAGGAAACUCC CU UCAAGGACAUCGUCCGGG AGGCCCUG | 2205 |
| 160 | GCCUGCAG G CUGUGCCC | 577 | GGGCACAG GGAGGAAACUCC CU UCAAGGACAUCGUCCGGG CUGGAGGC | 2206 |
| 163 | UGCAGGCU G UGCCCGUG | 578 | CACGGGCA GGAGGAAACUCC CU UCAAGGACAUCGUCCGGG AGCCUGCA | 2207 |
| 165 | CAGGCUGU G CCCGUGGG | 579 | CCCACGGG GGAGGAAACUCC CU UCAAGGACAUCGUCCGGG ACAGCCUG | 2208 |
| 169 | CUGUGCCC G UGGGCAUC | 580 | GAUGCCCA GGAGGAAACUCC CU UCAAGGACAUCGUCCGGG GGGCACAG | 2209 |
| 173 | GCCCGUGG G CAUCCCUG | 581 | CAGGGAUG GGAGGAAACUCC CU UCAAGGACAUCGUCCGGG CCACGGGC | 2210 |
| 181 | GCAUCCCU G CUGCCAGC | 582 | GCUGGCAG GGAGGAAACUCC CU UCAAGGACAUCGUCCGGG AGGGAUGC | 2211 |
| 184 | UCCCUGCU G CCAGCCAG | 583 | CUGGCUGG GGAGGAAACUCC CU UCAAGGACAUCGUCCGGG AGCAGGGA | 2212 |
| 188 | UGCUGCCA G CCAGCGCA | 584 | UGCGCUGG GGAGGAAACUCC CU UCAAGGACAUCGUCCGGG UGGCAGCA | 2213 |
| 192 | GCCAGCCA G CGCAUCUU | 585 | AAGAUGCG GGAGGAAACUCC CU UCAAGGACAUCGUCCGGG UGGCUGGC | 2214 |
| 194 | CAGCCAGC G CAUCUUCC | 586 | GGAAGAUG GGAGGAAACUCC CU UCAAGGACAUCGUCCGGG GCUGGCUG | 2215 |
| 204 | AUCUUCCU G CACGGCAA | 587 | UUGCCGUG GGAGGAAACUCC CU UCAAGGACAUCGUCCGGG AGGAAGAU | 2216 |
| 209 | CCUGCACG G CAACCGCA | 588 | UGCGGUUG GGAGGAAACUCC CU UCAAGGACAUCGUCCGGG CGUGCAGG | 2217 |
| 572 | CCUGCACG G CAACCGCA | 588 | UGCGGUUG GGAGGAAACUCC CU UCAAGGACAUCGUCCGGG CGUGCAGG | 2218 |
| 215 | CGGCAACC G CAUCUCGC | 589 | GCGAGAUG GGAGGAAACUCC CU UCAAGGACAUCGUCCGGG GGUUGCCG | 2219 |
| 222 | CGCAUCUC G CAUGUGCC | 590 | GGCACAUG GGAGGAAACUCC CU UCAAGGACAUCGUCCGGG GAGAUGCG | 2220 |
| 226 | UCUCGCAU G UGCCAGCU | 591 | AGCUGGCA GGAGGAAACUCC CU UCAAGGACAUCGUCCGGG AUGCGAGA | 2221 |
| 228 | UCGCAUGU G CCAGCUGC | 592 | GCAGCUGG GGAGGAAACUCC CU UCAAGGACAUCGUCCGGG ACAUGCGA | 2222 |
| 232 | AUGUGCCA G CUGCCAGC | 593 | GCUGGCAG GGAGGAAACUCC CU UCAAGGACAUCGUCCGGG UGGCACAU | 2223 |
| 235 | UGCCAGCU G CCAGCUUC | 594 | GAAGCUGG GGAGGAAACUCC CU UCAAGGACAUCGUCCGGG AGCUGGCA | 2224 |
| 239 | AGCUGCCA G CUUCCGUG | 595 | CACGGAAG GGAGGAAACUCC CU UCAAGGACAUCGUCCGGG UGGCAGCU | 2225 |
| 245 | CAGCUUCC G UGCCUGCC | 596 | GGCAGGCA GGAGGAAACUCC CU UCAAGGACAUCGUCCGGG GGAAGCUG | 2226 |
| 247 | GCUUCCGU G CCUGCCGC | 597 | GCGGCAGG GGAGGAAACUCC CU UCAAGGACAUCGUCCGGG ACGGAAGC | 2227 |
| 251 | CCGUGCCU G CCGCAACC | 598 | GGUUGCGG GGAGGAAACUCC CU UCAAGGACAUCGUCCGGG AGGCACGG | 2228 |
| 254 | UGCCUGCC G CAACCUCA | 599 | UGAGGUUG GGAGGAAACUCC CU UCAAGGACAUCGUCCGGG GGCAGGCA | 2229 |
| 270 | ACCAUCCU G UGGCUGCA | 600 | UGCAGCCA GGAGGAAACUCC CU UCAAGGACAUCGUCCGGG AGGAUGGU | 2230 |
| 273 | AUCCUGUG G CUGCACUC | 601 | GAGUGCAG GGAGGAAACUCC CU UCAAGGACAUCGUCCGGG CACAGGAU | 2231 |
| 276 | CUGUGGCU G CACUCGAA | 602 | UUCGAGUG GGAGGAAACUCC CU UCAAGGACAUCGUCCGGG AGCCACAG | 2232 |
| 286 | ACUCGAAU G UGCUGGCC | 603 | GGCCAGCA GGAGGAAACUCC CU UCAAGGACAUCGUCCGGG AUUCGAGU | 2233 |
| 288 | UCGAAUGU G CUGGCCCG | 604 | CGGGCCAG GGAGGAAACUCC CU UCAAGGACAUCGUCCGGG ACAUUCGA | 2234 |
| 292 | AUGUGCUG G CCCGAAUU | 605 | AAUUCGGG GGAGGAAACUCC CU UCAAGGACAUCGUCCGGG CAGCACAU | 2235 |
| 304 | GAAUUGAU G CGGCUGCC | 606 | GGCAGCCG GGAGGAAACUCC CU UCAAGGACAUCGUCCGGG AUCAAUUC | 2236 |
| 307 | UUGAUGCG G CUGCCUUC | 607 | GAAGGCAG GGAGGAAACUCC CU UCAAGGACAUCGUCCGGG CGCAUCAA | 2237 |
| 310 | AUGCGGCU G CCUUCACU | 608 | AGUGAAGG GGAGGAAACUCC CU UCAAGGACAUCGUCCGGG AGCCGCAU | 2238 |
| 320 | CUUCACUG G CCUGGCCC | 609 | GGGCCAGG GGAGGAAACUCC CU UCAAGGACAUCGUCCGGG CAGUGAAG | 2239 |
| 325 | CUGGCCUG G CCCUCCUG | 610 | CAGGAGGG GGAGGAAACUCC CU UCAAGGACAUCGUCCGGG CAGGCCAG | 2240 |
| 336 | CUCCUGGA G CAGCUGGA | 611 | UCCAGCUG GGAGGAAACUCC CU UCAAGGACAUCGUCCGGG UCCAGGAG | 2241 |
| 339 | CUGGAGCA G CUGGACCU | 612 | AGGUCCAG GGAGGAAACUCC CU UCAAGGACAUCGUCCGGG UGCUCCAG | 2242 |
| 350 | GGACCUCA G CGAUAAUG | 613 | CAUUAUCG GGAGGAAACUCC CU UCAAGGACAUCGUCCGGG UGAGGUCC | 2243 |
| 358 | GCGAUAAU G CACAGCUC | 614 | GAGCUGUG GGAGGAAACUCC CU UCAAGGACAUCGUCCGGG AUUAUCGC | 2244 |
| 363 | AAUGCACA G CUCCGGUC | 615 | GACCGGAG GGAGGAAACUCC CU UCAAGGACAUCGUCCGGG UGUGCAUU | 2245 |
| 369 | CAGCUCCG G UCUGUGGA | 616 | UCCACAGA GGAGGAAACUCC CU UCAAGGACAUCGUCCGGG CGGAGCUG | 2246 |
| 373 | UCCGGUCU G UGGACCCU | 617 | AGGGUCCA GGAGGAAACUCC CU UCAAGGACAUCGUCCGGG AGACCGGA | 2247 |
| 382 | UGGACCCU G CCACAUUC | 618 | GAAUGUGG GGAGGAAACUCC CU UCAAGGACAUCGUCCGGG AGGGUCCA | 2248 |
| 395 | AUUCCACG G CCUGGGCC | 619 | GGCCCAGG GGAGGAAACUCC CU UCAAGGACAUCGUCCGGG CGUGGAAU | 2249 |
| 401 | CGGCCUGG G CCGCCUAC | 620 | GUAGGCGG GGAGGAAACUCC CU UCAAGGACAUCGUCCGGG CCAGGCCG | 2250 |
| 404 | CCUGGGCC G CCUACACA | 621 | UGUGUAGG GGAGGAAACUCC CU UCAAGGACAUCGUCCGGG GGCCCAGG | 2251 |
| 414 | CUACACAC G CUGCACCU | 622 | AGGUGCAG GGAGGAAACUCC CU UCAAGGACAUCGUCCGGG GUGUGUAG | 2252 |
| 417 | CACACGCU G CACCUGGA | 623 | UCCAGGUG GGAGGAAACUCC CU UCAAGGACAUCGUCCGGG AGCGUGUG | 2253 |
| 428 | CCUGGACC G CUGCGGCC | 624 | GGCCGCAG GGAGGAAACUCC CU UCAAGGACAUCGUCCGGG GGUCCAGG | 2254 |
| 431 | GGACCGCU G CGGCCUGC | 625 | GCAGGCCG GGAGGAAACUCC CU UCAAGGACAUCGUCCGGG AGCGGUCC | 2255 |
| 434 | CCGCUGCG G CCUGCAGG | 626 | CCUGCAGG GGAGGAAACUCC CU UCAAGGACAUCGUCCGGG CGCAGCGG | 2256 |
| 438 | UGCGGCCU G CAGGAGCU | 627 | AGCUCCUG GGAGGAAACUCC CU UCAAGGACAUCGUCCGGG AGGCCGCA | 2257 |
| 444 | CUGCAGGA G CUGGGCCC | 628 | GGGCCCAG GGAGGAAACUCC CU UCAAGGACAUCGUCCGGG UCCUGCAG | 2258 |
| 449 | GGAGCUGG G CCCGGGGC | 629 | GCCCCGGG GGAGGAAACUCC CU UCAAGGACAUCGUCCGGG CCAGCUCC | 2259 |
| 456 | GGCCCGGG G CUGUUCCG | 630 | CGGAACAG GGAGGAAACUCC CU UCAAGGACAUCGUCCGGG CCCGGGCC | 2260 |
| 459 | CCGGGGCU G UUCCGCGG | 631 | CCGCGGAA GGAGGAAACUCC CU UCAAGGACAUCGUCCGGG AGCCCCGG | 2261 |
| 464 | GCUGUUCC G CGGCCUGG | 632 | CCAGGCCG GGAGGAAACUCC CU UCAAGGACAUCGUCCGGG GGAACAGC | 2262 |
| 467 | GUUCCGCG G CCUGGCUG | 633 | CAGCCAGG GGAGGAAACUCC CU UCAAGGACAUCGUCCGGG CGCGGAAC | 2263 |
| 472 | GCGGCCUG G CUGCCCUG | 634 | CAGGGCAG GGAGGAAACUCC CU UCAAGGACAUCGUCCGGG CAGGCCGC | 2264 |
| 475 | GCCUGGCU G CCCUGCAG | 635 | CUGCAGGG GGAGGAAACUCC CU UCAAGGACAUCGUCCGGG AGCCAGGC | 2265 |
| 480 | GCUGCCCU G CAGUACCU | 636 | AGGUACUG GGAGGAAACUCC CU UCAAGGACAUCGUCCGGG AGGGCAGC | 2266 |
| 483 | GCCCUGCA G UACCUCUA | 637 | UAGAGGUA GGAGGAAACUCC CU UCAAGGACAUCGUCCGGG UGCAGGGC | 2267 |
| 495 | CUCUACCU G CAGGACAA | 638 | UUGUCCUG GGAGGAAACUCC CU UCAAGGACAUCGUCCGGG AGGUAGAG | 2268 |
| 505 | AGGACAAC G CGCUGCAG | 639 | CUGCAGCG GGAGGAAACUCC CU UCAAGGACAUCGUCCGGG GUUGUCCU | 2269 |
| 507 | GACAACGC G CUGCAGGC | 640 | GCCUGCAG GGAGGAAACUCC CU UCAAGGACAUCGUCCGGG GCGUUGUC | 2270 |
| 510 | AACGCGCU G CAGGCACU | 641 | AGUGCCUG GGAGGAAACUCC CU UCAAGGACAUCGUCCGGG AGCGCGUU | 2271 |
| 514 | CGCUGCAG G CACUGCCU | 642 | AGGCAGUG GGAGGAAACUCC CU UCAAGGACAUCGUCCGGG CUGCAGCG | 2272 |
| 519 | CAGGCACU G CCUGAUGA | 643 | UCAUCAGG GGAGGAAACUCC CU UCAAGGACAUCGUCCGGG AGUGCCUG | 2273 |
| 536 | CACCUUCC G CGACCUGG | 644 | CCAGGUCG GGAGGAAACUCC CU UCAAGGACAUCGUCCGGG GGAAGGUG | 2274 |
| 545 | CGACCUGG G CAACCUCA | 645 | UGAGGUUG GGAGGAAACUCC CU UCAAGGACAUCGUCCGGG CCAGGUCG | 2275 |
| 567 | CUCUUCCU G CACGGCAA | 646 | UUGCCGUG GGAGGAAACUCC CU UCAAGGACAUCGUCCGGG AGGAAGAG | 2276 |
| 578 | CGGCAACC G CAUCUCCA | 647 | UGGAGAUG GGAGGAAACUCC CU UCAAGGACAUCGUCCGGG GGUUGCCG | 2277 |
| 587 | CAUCUCCA G CGUGCCCG | 648 | CGGGCACG GGAGGAAACUCC CU UCAAGGACAUCGUCCGGG UGGAGAUG | 2278 |
| 589 | UCUCCAGC G UGCCCGAG | 649 | CUCGGGCA GGAGGAAACUCC CU UCAAGGACAUCGUCCGGG GCUGGAGA | 2279 |
| 591 | UCCAGCGU G CCCGAGCG | 650 | CGCUCGGG GGAGGAAACUCC CU UCAAGGACAUCGUCCGGG ACGCUGGA | 2280 |
| 597 | GUGCCCGA G CGCGCCUU | 651 | AAGGCGCG GGAGGAAACUCC CU UCAAGGACAUCGUCCGGG UCGGGCAC | 2281 |
| 599 | GCCCGAGC G CGCCUUCC | 652 | GGAAGGCG GGAGGAAACUCC CU UCAAGGACAUCGUCCGGG GCUCGGGC | 2282 |
| 601 | CCGAGCGC C CCUUCCGU | 653 | ACGGAAGG GGAGGAAACUCC CU UCAAGGACAUCGUCCGGG GCGCUCGG | 2283 |
| 608 | CGCCUUCC G UGGGCUGC | 654 | GCAGCCCA GGAGGAAACUCC CU UCAAGGACAUCGUCCGGG GGAAGCCG | 2284 |
| 612 | UUCCGUGG G CUCCACAG | 655 | CUGUGCAG GGAGGAAACUCC CU UCAAGGACAUCGUCCGGG CCACGGAA | 2285 |
| 615 | CGUGGGCU G CACAGCCU | 656 | AGGCUGUG GGAGGAAACUCC CU UCAAGGACAUCGUCCGGG AGCCCACG | 2286 |
| 620 | GCUGCACA C CCUCGACC | 657 | GCUCGAGG GGAGGAAACUCC CU UCAAGGACAUCGUCCGGG UGUGCAGC | 2287 |
| 629 | CCUCGACC G UCUCCUAC | 658 | GUAGGAGA GGAGGAAACUCC CU UCAAGGACAUCGUCCGGG GGUCGAGG | 2288 |
| 639 | CUCCUACU C CACCAGAA | 659 | UUCUGGUG GGAGGAAACUCC CU UCAAGGACAUCGUCCGGG ACUAGGAG | 2289 |
| 650 | CCAGAACC C CGUGGCCC | 660 | GGCCCACG GCAGGAAACUCC CU UCAAGGACAUCGUCCCGG GGUUCUGC | 2290 |
| 652 | AGAACCGC G UGGCCCAU | 661 | AUGGGCCA GGAGGAAACUCC CU UCAAGGACAUCGUCCGGG GCGGUUCU | 2291 |
| 655 | ACCGCGUG C CCCAUGUG | 662 | CACAUGGG GCAGGAAACUCC CU UCAAGGACAUCGUCCGGG CACGCGGU | 2292 |
| 661 | UGGCCCAU G UGCACCCG | 663 | CGGGUGCA GGACGAAACUCC CU UCAAGGACAUCGUCCGGG AUGGGCCA | 2293 |
| 663 | GCCCAUGU C CACCCGCA | 664 | UGCGGGUG GGAGGAAACUCC CU UCAACGACAUCGUCCGGG ACAUGGGC | 2294 |
| 669 | GUGCACCC G CAUGCCUU | 665 | AAGGCAUG GGAGGAAACUCC CU UCAAGGACAUCGUCCGGG CGGUGCAC | 2295 |
| 673 | ACCCGCAU C CCUUCCGU | 666 | ACGGAAGG GGACGAAACUCC CU UCAAGGACAUCGUCCGGG AUGCGGGU | 2296 |
| 680 | UGCCUUCC G UGACCUUG | 667 | CAAGGUCA GGAGGAAACUCC CU UCAAGGACAUCCUCCGGG CGAAGGCA | 2297 |
| 689 | UGACCUUG C CCGCCUCA | 668 | UGAGGCGG GCAGGAAACUCC CU UCAAGGACAUCGUCCGGG CAAGCUCA | 2298 |
| 692 | CCUUGGCC C CCUCAUGA | 669 | UCAUGAGG GGAGGAAACUCC CU UCAAGGACAUCGUCCGGG GGCCAAGG | 2299 |
| 711 | CUCUAUCU G UUUGCCAA | 670 | UUGGCAAA GGAGGAAACUCC CU UCAAGGACAUCGUCCGGG ACAUAGAG | 2300 |
| 715 | AUCUGUUU G CCAACAAU | 671 | AUUGUUGC GCAGCAAACUCC CU UCAAGGACAUCGUCCGGG AAACAGAU | 2301 |
| 730 | AUCUAUCA C CGCUGCCC | 672 | GCGCACCG GGAGGAAACUCC CU UCAAGGACAUCGUCCGGG UGAUAGAU | 2302 |
| 732 | CUAUCACC G CUCCCCAC | 673 | GUGGGCAC GGAGGAAACUCC CU UCAAGGACAUCGUCCCGG GCUGAUAG | 2303 |
| 735 | UCAGCGCU G CCCACUGA | 674 | UCAGUGGG GGAGGAAACUCC CU UCAAGGACAUCCUCCGGG AGCGCUGA | 2304 |
| 745 | CCACUGAC C CCCUGGCC | 675 | GGCCAGGG GGAGGAAACUCC CU UCAAGGACAUCGUCCGCG CUCACUCG | 2305 |
| 751 | AGGCCCUC C CCCCCCUG | 676 | CAGGGCGG GGAGGAAACUCC CU UCAAGGACAUCCUCCGGG CAGGGCCU | 2306 |
| 759 | GCCCCCCU C CGUGCCCU | 677 | AGGGCACG GGAGGAAACUCC CU UCAAGGACAUCGUCCGGC AGGGGGGC | 2307 |
| 761 | CCCCCUCC G UGCCCUGC | 678 | GCACGGCA GGAGCAAACUCC CU UCAACGACAUCGUCCGGG CCAGCGGG | 2308 |
| 763 | CCCUGCGU C CCCUGCAG | 679 | CUCCAGGG GGAGGAAACUCC CU UCAAGGACAUCGUCCGGG ACGCAGGG | 2309 |
| 768 | CGUGCCCU C CAGUACCU | 680 | AGGUACUG GGAGGAAACUCC CU UCAACGACAUCCUCCGGG AGCGCACG | 2310 |
| 771 | GCCCUGCA C UACCUGAC | 681 | CUCACCUA GGAGCAAACUCC CU UCAAGCACAUCGUCCCGC UGCACCCC | 2311 |
| 780 | UACCUGAC C CUCAACGA | 682 | UCGUUGAG CGAGGAAACUCC CU UCAACGACAUCCUCCCGG CUCACCUA | 2312 |
| 799 | ACCCCUGG C UGUGUGAC | 683 | GUCACACA GCAGCAAACUCC CU UCAACGACAUCCUCCCGG CCAGGCGU | 2313 |
| 801 | CCCUCGGU C UGUGACUC | 684 | CAGUCACA GGAGGAAACUCC CU UCAAGGACAUCGUCCGGG ACCCACGC | 2314 |
| 803 | CUCGGUGU C UGACUGCC | 685 | GGCAGUCA GGAGCAAACUCC CU UCAAGGACAUCGUCCCGG ACACCCAG | 2315 |
| 809 | GUGUGACU C CCGGCCAC | 686 | GUCCCCGC CGAGGAAACUCC CU UCAACCACAUCGUCCGGG ACUCACAC | 2316 |
| 814 | ACUGCCGC C CACGCCCA | 687 | UCCCCGUG GGACGAAACUCC CU UCAACGACAUCGUCCGGC CCGCCAGU | 2317 |
| 818 | CCCCGCAC C CCCACUCU | 688 | AGAGUGGG CCAGCAAACUCC CU UCAAGGACAUCGUCCGGG GUGCCCCC | 2318 |
| 829 | CACUCUGG C CCUCCCUG | 689 | CAGCCAGG CGAGGAAACUCC CU UCAAGGACAUCGUCCCGC CCAGACUG | 2319 |
| 834 | UGGGCCUG G CUGCAGAA | 690 | UUCUGCAG GGAGGAAACUCC CU UCAAGGACAUCGUCCGGG CAGGCCCA | 2320 |
| 837 | GCCUGGCU G CAGAAGUU | 691 | AACUUCUG GGAGGAAACUCC CU UCAAGGACAUCGUCCGGG AGCCAGGC | 2321 |
| 843 | CUGCAGAA G UUCCGCGG | 692 | CCGCGGAA GGAGGAAACUCC CU UCAAGGACAUCGUCCGGG UUCUGCAC | 2322 |
| 848 | GAAGUUCC G CGGCUCCU | 693 | AGGAGCCG GGAGGAAACUCC CU UCAAGGACAUCGUCCGGG GGAACUUC | 2323 |
| 851 | GUUCCGCG G CUCCUCCU | 694 | AGGAGGAG GGAGGAAACUCC CU UCAAGGACAUCGUCCGGG CGCGGAAC | 2324 |
| 865 | CCUCCGAG G UGCCCUGC | 695 | GCAGGGCA GGAGGAAACUCC CU UCAAGGACAUCGUCCGGG CUCGGAGG | 2325 |
| 867 | UCCGAGGU G CCCUGCAG | 696 | CUGCAGGG GGAGGAAACUCC CU UCAAGGACAUCGUCCGGG ACCUCGGA | 2326 |
| 872 | GGUGCCCU G CAGCCUCC | 697 | GGAGGCUG GGAGGAAACUCC CU UCAAGGACAUCGUCCGGG AGGGCACC | 2327 |
| 875 | GCCCUGCA G CCUCCCGC | 698 | GCGGGAGG GGAGGAAACUCC CU UCAAGGACAUCGUCCGGG UGCAGGGC | 2328 |
| 882 | AGCCUCCC G CAACGCCU | 699 | AGGCGUUG GGAGGAAACUCC CU UCAAGGACAUCGUCCGGG GGGAGGCU | 2329 |
| 887 | CCCGCAAC G CCUGGCUG | 700 | CAGCCAGG GGAGGAAACUCC CU UCAAGGACAUCGUCCGGG GUUGCGGG | 2330 |
| 892 | AACGCCUG G CUGGCCGU | 701 | ACGGCCAG GGAGGAAACUCC CU UCAAGGACAUCGUCCGGG CAGGCGUU | 2331 |
| 896 | CCUGGCUG G CCGUGACC | 702 | GGUCACGG GGAGGAAACUCC CU UCAAGGACAUCGUCCGGG CAGCCAGG | 2332 |
| 899 | GGCUGGCC G UGACCUCA | 703 | UGAGGUCA GGAGGAAACUCC CU UCAAGGACAUCGUCCGGG GGCCAGCC | 2333 |
| 911 | CCUCAAAC G CCUAGCUG | 704 | CAGCUAGG GGAGGAAACUCC CU UCAAGGACAUCGUCCGGG GUUUGAGG | 2334 |
| 916 | AACGCCUA G CUGCCAAU | 705 | AUUGGCAG GGAGGAAACUCC CU UCAAGGACAUCGUCCGGG UAGGCGUU | 2335 |
| 919 | GCCUAGCU G CCAAUGAC | 706 | GUCAUUGG GGAGGAAACUCC CU UCAAGGACAUCGUCCGGG AGCUAGGC | 2336 |
| 930 | AAUGACCU G CAGGGCUG | 707 | CAGCCCUG GGAGGAAACUCC CU UCAAGGACAUCGUCCGGG AGGUCAUU | 2337 |
| 935 | CCUGCAGG G CUGCGCUG | 708 | CAGCGCAG GGAGGAAACUCC CU UCAAGGACAUCGUCCGGG CCUGCAGG | 2338 |
| 938 | GCAGGGCU G CGCUGUGG | 709 | CCACAGCG GGAGGAAACUCC CU UCAAGGACAUCGUCCGGG AGCCCUGC | 2339 |
| 940 | AGGGCUGC G CUGUGGCC | 710 | GGCCACAG GGAGGAAACUCC CU UCAAGGACAUCGUCCGGG GCAGCCCU | 2340 |
| 943 | GCUGCGCU G UGGCCACC | 711 | GGUGGCCA GGAGGAAACUCC CU UCAAGGACAUCGUCCGGG AGCGCAGC | 2341 |
| 946 | GCGCUGUG G CCACCGGC | 712 | GCCGGUGG GGAGGAAACUCC CU UCAAGGACAUCGUCCGGG CACAGCGC | 2342 |
| 953 | GGCCACCG G CCCUUACC | 713 | GGUAAGGG GGAGGAAACUCC CU UCAAGGACAUCGUCCGGG CGGUGGCC | 2343 |
| 977 | CUGGACCG G CAGGGCCA | 714 | UGGCCCUG GGAGGAAACUCC CU UCAAGGACAUCGUCCGGG CGGUCCAG | 2344 |
| 982 | CCGGCAGG G CCACCGAU | 715 | AUCGGUGG GGAGGAAACUCC CU UCAAGGACAUCGUCCGGG CCUGCCGG | 2345 |
| 996 | GAUGAGGA G CCGCUGGG | 716 | CCCAGCGG GGAGGAAACUCC CU UCAAGGACAUCGUCCGGG UCCUCAUC | 2346 |
| 999 | GAGGAGCC G CUGGGGCU | 717 | AGCCCCAG GGAGGAAACUCC CU UCAAGGACAUCGUCCGGG GGCUCCUC | 2347 |
| 1005 | CCGCUGGG G CUUCCCAA | 718 | UUGGGAAG GGAGGAAACUCC CU UCAAGGACAUCGUCCGGG CCCAGCGG | 2348 |
| 1014 | CUUCCCAA G UGCUGCCA | 719 | UGGCAGCA GGAGGAAACUCC CU UCAAGGACAUCGUCCGGG UUGGGAAG | 2349 |
| 1016 | UCCCAAGU G CUGCCAGC | 720 | GCUGGCAG GGAGGAAACUCC CU UCAAGGACAUCGUCCGGG ACUUGGGA | 2350 |
| 1019 | CAAGUGCU G CCAGCCAG | 721 | CUGGCUGG GGAGGAAACUCC CU UCAAGGACAUCGUCCGGG AGCACUUG | 2351 |
| 1023 | UGCUGCCA G CCAGAUGC | 722 | GCAUCUGG GGAGGAAACUCC CU UCAAGGACAUCGUCCGGG UGGCAGCA | 2352 |
| 1030 | AGCCAGAU G CCGCUGAC | 723 | GUCAGCGG GGAGGAAACUCC CU UCAAGGACAUCGUCCGGG AUCUGGCU | 2353 |
| 1033 | CAGAUGCC G CUGACAAG | 724 | CUUGUCAG GGAGGAAACUCC CU UCAAGGACAUCGUCCGGG GGCAUCUG | 2354 |
| 1042 | CUGACAAG G CCUCAGUA | 725 | UACUGAGG GGAGGAAACUCC CU UCAAGGACAUCGUCCGGG CUUGUCAG | 2355 |
| 1048 | AGGCCUCA G UACUGGAG | 726 | CUCCAGUA GGAGGAAACUCC CU UCAAGGACAUCGUCCGGG UGAGGCCU | 2356 |
| 1056 | GUACUGGA G CCUGGAAG | 727 | CUUCCAGG GGAGGAAACUCC CU UCAAGGACAUCGUCCGGG UCCAGUAC | 2357 |
| 1069 | GAAGACCA G CUUCGGCA | 728 | UGCCGAAG GGAGGAAACUCC CU UCAAGGACAUCGUCCGGG UGGUCUUC | 2358 |
| 1075 | CAGCUUCG G CAGGCAAU | 729 | AUUGCCUG GGAGGAAACUCC CU UCAAGGACAUCGUCCGGG CGAAGCUG | 2359 |
| 1079 | UUCGGCAG G CAAUGCGC | 730 | GCGCAUUG GGAGGAAACUCC CU UCAAGGACAUCGUCCGGG CUGCCGAA | 2360 |
| 1084 | CAGGCAAU G CGCUGAAG | 731 | CUUCAGCG GGAGGAAACUCC CU UCAAGGACAUCGUCCGGG AUUGCCUG | 2361 |
| 1086 | GGCAAUGC G CUGAAGGG | 732 | CCCUUCAG GGAGGAAACUCC CU UCAAGGACAUCGUCCGGG GCAUUGCC | 2362 |
| 1097 | GAAGGGAC G CGUGCCGC | 733 | GCGGCACG GGAGGAAACUCC CU UCAAGGACAUCGUCCGGG GUCCCUUC | 2363 |
| 1099 | AGGGACGC G UGCCGCCC | 734 | GGGCGGCA GGAGGAAACUCC CU UCAAGGACAUCGUCCGGG GCGUCCCU | 2364 |
| 1101 | GGACGCGU G CCGCCCGG | 735 | CCGGGCGG GGAGGAAACUCC CU UCAAGGACAUCGUCCGGG ACGCGUCC | 2365 |
| 1104 | CGCGUGCC G CCCGGUGA | 736 | UCACCGGG GGAGGAAACUCC CU UCAAGGACAUCGUCCGGG GGCACGCG | 2366 |
| 1109 | GCCGCCCG G UGACAGCC | 737 | GGCUGUCA GGAGGAAACUCC CU UCAAGGACAUCGUCCGGG CGGGCGGC | 2367 |
| 1115 | CGGUGACA G CCCGCCGG | 738 | CCGGCGGG GGAGGAAACUCC CU UCAAGGACAUCGUCCGGG UGUCACCG | 2368 |
| 1119 | GACAGCCC G CCGGGCAA | 739 | UUGCCCGG GGAGGAAACUCC CU UCAAGGACAUCGUCCGGG GGGCUGUC | 2369 |
| 1124 | CCCGCCGG G CAACGGCU | 740 | AGCCGUUG GGAGGAAACUCC CU UCAAGGACAUCGUCCGGG CCGGCGGG | 2370 |
| 1130 | GGGCAACG G CUCUGGCC | 741 | GGCCAGAG GGAGGAAACUCC CU UCAAGGACAUCGUCCGGG CGUUGCCC | 2371 |
| 1136 | CGGCUCUG G CCCACGGC | 742 | GCCGUGGG GGAGGAAACUCC CU UCAAGGACAUCGUCCGGG CAGAGCCG | 2372 |
| 1143 | GGCCCACG G CACAUCAA | 743 | UUGAUGUG GGAGGAAACUCC CU UCAAGGACAUCGUCCGGG CUGGGGCC | 2373 |
| 1173 | GGGACUCU G CCUGGCUC | 744 | GAGCCAGG GGAGGAAACUCC CU UCAAGGACAUCGUCCGGG AGAGUCCC | 2374 |
| 1178 | UCUGCCUG G CUCUGGUG | 745 | CAGCAGAG GGAGGAAACUCC CU UCAAGGACAUCGUCCGGG CAGGCAGA | 2375 |
| 1183 | CUGGCUCU G CUGAGCCC | 746 | GGGCUCAG GGAGGAAACUCC CU UCAAGGACAUCGUCCGGG AGAGCCAG | 2376 |
| 1188 | UCUGCUGA G CCCCCGCU | 747 | AGCGGGGG GGAGGAAACUCC CU UCAAGGACAUCGUCCGGG UCAGCAGA | 2377 |
| 1194 | GAGCCCCC G CUCACUGC | 748 | GCAGUGAG GGAGGAAACUCC CU UCAAGGACAUCGUCCGGG GGGGGCUC | 2378 |
| 1201 | CGCUCACU G CAGUGCGG | 749 | CCGCACUG GGAGGAAACUCC CU UCAAGGACAUCGUCCGGG AGUGAGCG | 2379 |
| 1204 | UCACUGCA G UGCGGCCC | 750 | GGGCCGCA GGAGGAAACUCC CU UCAAGGACAUCGUCCGGG UGCAGUGA | 2380 |
| 1206 | ACUGCAGU G CGGCCCGA | 751 | UCGGGCCG GGAGGAAACUCC CU UCAAGGACAUCGUCCGGG ACUGCAGU | 2381 |
| 1209 | GCAGUGCG G CCCGAGGG | 752 | CCCUCGGG GGAGGAAACUCC CU UCAAGGACAUCGUCCGGG CGCACUGC | 2382 |
| 1217 | GCCCGAGG G CUCCGAGC | 753 | GCUCGGAG GGAGGAAACUCC CU UCAAGGACAUCGUCCGGG CCUCGGGC | 2383 |
| 1224 | GGCUCCGA G CCACCAGG | 754 | CCUGGUGG GGAGGAAACUCC CU UCAAGGACAUCGUCCGGG UCGGAGCC | 2384 |
| 1233 | CCACCAGG G UUCCCCAC | 755 | GUGGGGAA GGAGGAAACUCC CU UCAAGGACAUCGUCCGGG CCUGGUGG | 2385 |
| 1247 | CACCUCGG G CCCUCGCC | 756 | GGCGAGGG GGAGGAAACUCC CU UCAAGGACAUCGUCCGGG CCGAGGUG | 2386 |
| 1253 | GGGCCCUC G CCGGAGGC | 757 | GCCUCCGG GGAGGAAACUCC CU UCAAGGACAUCGUCCGGG GAGGGCCC | 2387 |
| 1260 | CGCCGGAG G CCAGGCUG | 758 | CAGCCUGG GGAGGAAACUCC CU UCAAGGACAUCGUCCGGG CUCCGGCG | 2388 |
| 1265 | GAGGCCAG G CUGUUCAC | 759 | GUGAACAG GGAGGAAACUCC CU UCAAGGACAUCGUCCGGG CUGGCCUC | 2389 |
| 1268 | GCCAGGCU G UUCACGCA | 760 | UGCGUGAA GGAGGAAACUCC CU UCAAGGACAUCGUCCGGG AGCCUGGC | 2390 |
| 1274 | CUGUUCAC G CAAGAACC | 761 | GGUUCUUG GGAGGAAACUCC CU UCAAGACAUCGUCCGGGG GUGAACAG | 2391 |
| 1283 | CAAGAACC G CACCCGCA | 762 | UGCGGGUG GGAGGAAACUCC CU UCAAGGACAUCGUCCGGG GGUUCUUG | 2392 |
| 1289 | CCGCACCC G CAGCCACU | 763 | AGUGGCUG GAGAAACUCCCU CU UCAAGGACAUCGUCCGGG GGGUGCGG | 2393 |
| 1292 | CACCCGCA G CCACUGCC | 764 | GGCAGUGG GGAGGAAACUCC CU UCAAGGACAUCGUCCGGG UGCGGGUG | 2394 |
| 1298 | CAGCCACU G CCGUCUGG | 765 | CCAGACGG GGAGGAAACUCC CU UCAAGGACAUCGUCCGGG AGUGGCUG | 2395 |
| 1301 | CCACUGCC G UCUGGGCC | 766 | GGCCCAGA GGAGGAAACUCC CU UCAAGGACAUCGUCCGGG GGCAGUGG | 2396 |
| 1307 | CCGUCUGG G CCAGGCAG | 767 | CUGCCUGC GGAGGAAACUCC CU UCAAGGACAUCGUCCGGG CCAGACGG | 2397 |
| 1312 | UGGGCCAG G CAGGCAGC | 768 | GCUGCCUG GGAGGAAACUCC CU UCAAGGACAUCGUCCGGG CUGGCCCA | 2398 |
| 1316 | CCAGGCAG G CAGCGGGG | 769 | CCCCGCUG GGAGGAAACUCC CU UCAAGGACAUCGUCCGGG CUGCCUGG | 2399 |
| 1319 | GGCAGGCA G CGGGGGUG | 770 | CACCCCCG GGAGGAAACUCC CU UCAAGGACAUCGUCCGGG UGCCUGCC | 2400 |
| 1325 | CAGCGGGG G UGGCGGGA | 771 | UCCCGCCA GGAGGAAACUCC CU UCAAGGACAUCGUCCGGG CCCCGCUG | 2401 |
| 1328 | CGGGGGUG G CGGGACUG | 772 | CAGUCCCG GGAGGAAACUCC CU UCAAGGACAUCGUCCGGG CACCCCCG | 2402 |
| 1337 | CGGGACUG G UGACUCAG | 773 | CUGAGUCA GGAGGAAACUCC CU UCAAGGACAUCGUCCGGG CAGUCCCG | 2403 |
| 1349 | CUCAGAAG G CUCAGGUG | 774 | CACCUGAG GGAGGAAACUCC CU UCAAGGACAUCGUCCGGG CUUCUGAG | 2404 |
| 1355 | AGGCUCAG G UGCCCUAC | 775 | GUAGGGCA GGAGGAAACUCC CU UCAAGGACAUCGUCCGGG CUGAGCCU | 2405 |
| 1357 | GCUCAGGU G CCCUACCC | 776 | GGGUAGGG GGAGGAAACUCC CU UCAAGGACAUCGUCCGGG ACCUGAGC | 2406 |
| 1367 | CCUACCCA G CCUCACCU | 777 | AGGUGAGG GGAGGAAACUCC CU UCAAGGACAUCGUCCGGG UGGGUAGG | 2407 |
| 1376 | CCUCACCU G CAGCCUCA | 778 | UGAGGCUG GGAGGAAACUCC CU UCAAGGACAUCGUCCGGG AGGUGAGG | 2408 |
| 1379 | CACCUGCA G CCUCACCC | 779 | GGGUGAGG GGAGGAAACUCC CU UCAAGGACAUCGUCCGGG UGCAGGUG | 2409 |
| 1394 | CCCCCUGG G CCUGGCGC | 780 | GCGCCAGG GGAGGAAACUCC CU UCAAGGACAUCGUCCGGG CCAGGGGG | 2410 |
| 1399 | UGGGCCUG G CGCUGGUG | 781 | CACCAGCG GGAGGAAACUCC CU UCAAGGACAUCGUCCGGG CAGGCCCA | 2411 |
| 1401 | GGCCUGGC G CUGGUGCU | 782 | AGCACCAG GGAGGAAACUCC CU UCAAGGACAUCGUCCGGG GCCAGGCC | 2412 |
| 1405 | UGGCGCUG G UGCUGUGG | 783 | CCACAGCA GGAGGAAACUCC CU UCAAGGACAUCGUCCGGG CAGCGCCA | 2413 |
| 1407 | GCGCUGGU G CUGUGGAC | 784 | GUCCACAG GGAGGAAACUCC CU UCAAGGACAUCGUCCGGG ACCAGCGC | 2414 |
| 1410 | CUGGUGCU G UGGACAGU | 785 | ACUGUCCA GGAGGAAACUCC CU UCAAGGACAUCGUCCGGG AGCACCAG | 2415 |
| 1417 | UGUGGACA G UGCUUGGG | 786 | CCCAAGCA GGAGGAAACUCC CU UCAAGGACAUCGUCCGGG UGUCCACA | 2416 |
| 1419 | UGGACAGU G CUUGGGCC | 787 | GGCCCAAG GGAGGAAACUCC CU UCAAGGACAUCGUCCGGG ACUGUCCA | 2417 |
| 1425 | GUGCUUGG G CCCUGCUG | 788 | CAGCAGGG GGAGGAAACUCC CU UCAAGGACAUCGUCCGGG CCAAGCAC | 2418 |
| 1430 | UGGGCCCU G CUGACCCC | 789 | GGGGUCAG GGAGGAAACUCC CU UCAAGGACAUCGUCCGGG AGGGCCCA | 2419 |
| 12 | ACCCCUAC G AUGAAGAG | 841 | CUCUUCAU GGAGGAAACUCC CU UCAAGGACAUCGUCCGGG GUAGGGGU | 2420 |
| 15 | CCUACGAU G AAGAGGGC | 842 | GCCCUCUU GGAGGAAACUCC CU UCAAGGACAUCGUCCGGG AUCGUAGG | 2421 |
| 18 | ACGAUGAA G AGGGCGUC | 843 | GACGCCCU GGAGGAAACUCC CU UCAAGGACAUCGUCCGGG UUCAUCGU | 2422 |
| 20 | GAUGAAGA G GGCGUCCG | 844 | CGGACGCC GGAGGAAACUCC CU UCAAGGACAUCGUCCGGG UCUUCAUC | 2423 |
| 21 | AUGAAGAG G GCGUCCGC | 845 | GCGGACGC GGAGGAAACUCC CU UCAAGGACAUCGUCCGGG CUCUUCAU | 2424 |
| 31 | CGUCCGCU G GAGGGAGC | 846 | GCUCCCUC GGAGGAAACUCC CU UCAAGGACAUCGUCCGGG AGCGGACG | 2425 |
| 32 | GUCCGCUG G AGGGAGCC | 847 | GGCUCCCU GGAGGAAACUCC CU UCAAGGACAUCGUCCGGG CAGCGGAC | 2426 |
| 34 | CCGCUGGA G GGAGCCGG | 848 | CCGGCUCC GGAGGAAACUCC CU UCAAGGACAUCGUCCGGG UCCAGCGG | 2427 |
| 35 | CGCUGGAG G GAGCCGGC | 849 | GCCGGCUC GGAGGAAACUCC CU UCAAGGACAUCGUCCGGG CUCCAGCG | 2428 |
| 36 | GCUGGAGG G AGCCGGCU | 850 | AGCCGGCU GGAGGAAACUCC CU UCAAGGACAUCGUCCGGG CCUCCAGC | 2429 |
| 41 | AGGGAGCC G GCUGCUGG | 851 | CCAGCAGC GGAGGAAACUCC CU UCAAGGACAUCGUCCGGG GGCUCCCU | 2430 |
| 48 | CGGCUGCU G GCAUGGGU | 852 | ACCCAUGC GGAGGAAACUCC CU UCAAGGACAUCGUCCGGG AGCAGCCG | 2431 |
| 53 | GCUGGCAU G GGUGCUGU | 853 | ACAGCACC GGAGGAAACUCC CU UCAAGGACAUCGUCCGGG AUGCCAGC | 2432 |
| 54 | CUGGCAUG G GUGCUGUG | 854 | CACACCAC GGAGGAAACUCC CU UCAAGGACAUCGUCCGGG CAUGCCAG | 2433 |
| 62 | GGUGCUGU C CCUGCAGG | 855 | CCUGCAGC GCAGCAAACUCC CU UCAAGGACAUCGUCCGGG ACAGCACC | 2434 |
| 69 | UGGCUGCA G GCCUGCCA | 856 | UGCCAGGC c3GAGGAAACUCC CU UCAAGGACAUCGUCCGGG UGCAGCCA | 2435 |
| 74 | GCACGCCU C GCACGUGG | 857 | CCACCUGC GGAGGAAACUCC CU UCAAGGACAUCGUCCGGG ACGCCUGC | 2436 |
| 78 | GCCUGGCA G GUGGCAGC | 858 | GCUGCCAC GGAGGAAACUCC CU UCAAGGACAUCGUCCGGG UGCCAGGC | 2437 |
| 81 | UGGCAGGU C GCAGCCCC | 859 | GGGGCUGC GGACGAAACUCC CU UCAAGGACAUCCUCCGCG ACCUGCCA | 2438 |
| 97 | CAUGCCCA G GUGCCUGC | 860 | GCAGGCAC GGAGGAAACUCC CU UCAACCACAUCGUCCGGG UGGGCAUG | 2439 |
| 118 | GCUACAAU G AGCCCAAG | 861 | CUUGGGCU GGAGGAAACUCC CU UCAAGGACAUCGUCCGGG AUUGUAGC | 2440 |
| 126 | GAGCCCAA G GUGACCAC | 862 | GUCGUCAC GGAGGAAACUCC CU UCAACGACAUCGUCCGGG UUGGGCUC | 2441 |
| 129 | CCCAAGGU G ACGACAAG | 863 | CUUGUCGU CGAGGAAACUCC CU UCAAGGACAUCGUCCGGG ACCUUGGG | 2442 |
| 132 | AAGGUGAC G ACAAGCUG | 864 | CAGCUUGU GGAGGAAACUCC CU UCAAGGACAUCCUCCGGG GUCACCUU | 2443 |
| 150 | CCCCAGCA C GGCCUGCA | 865 | UGCAGGCC GGAGGAAACUCC CU UCAAGGACAUCGUCCGGG UGCUGGGG | 2444 |
| 151 | CCCAGCAG G CCCUGCAG | 866 | CUGCAGGC GGAGGAAACUCC CU UCAACGACAUCCUCCGGG CUGCUGGG | 2445 |
| 159 | GGCCUGCA C CCUGUGCC | 867 | GGCACAGC GGAGGAAACUCC CU UCAAGGACAUCGUCCGGG UGCAGGCC | 2446 |
| 171 | CUGCCCGU G CGCAUCCC | 868 | CGGAUGCC GGACGAAACUCC CU UCAAGGACAUCGUCCCGC ACGGCCAC | 2447 |
| 172 | UGCCCGUG G GCAUCCCU | 869 | AGGGAUGC GGAGGAAACUCC CU UCAAGGACAUCGUCCGGG CACGGCCA | 2448 |
| 208 | UCCUCCAC C GCAACCGC | 870 | GCGGUUGC GGAGGAAACUCC CU UCAACGACAUCGUCCGGG GUCCAGGA | 2449 |
| 571 | UCCUCCAC G GCAACCGC | 870 | GCGCUUGC GGAGGAAACUCC CU UCAAGCACAUCGUCCGGG GUCCACCA | 2450 |
| 272 | CAUCCUGU C GCUGCACU | 871 | AGUCCACC CGAGGAAACUCC CU UCAACCACAUCGUCCCGG ACAGGAUG | 2451 |
| 282 | CUCCACUC C AAUCUGCU | 872 | AGCACAUU GGAGGAAACUCC CU UCAAGGACAUCGUCCGGG GAGUGCAG | 2452 |
| 291 | AAUGUCCU C GCCCGAAU | 873 | AUUCGCGC CCACCAAACUCC CU UCAACGACAUCGUCCCGG AGCACAUU | 2453 |
| 296 | GCUGGCCC C AAUUGAUG | 874 | CAUCAAUU GCAGGAAACUCC CU UCAAGCACAUCGUCCGCC GGCCCACC | 2454 |
| 301 | CCCGAAUU C AUGCGGCU | 875 | AGCCGCAU GGACGAAACUCC CU UCAAGCACAUCCUCCGGC AAUUCGGG | 2455 |
| 306 | AUUCAUGC C CCUGCCUU | 876 | AACCCACC GGAGGAAACUCC CU UCAAGGACAUCGUCCGGG CCAUCAAU | 2456 |
| 319 | CCUUCACU C GCCUGGCC | 877 | CGCCAGGC GGAGGAAACUCC CU UCAACGACAUCGUCCGCG AGUGAAGC | 2457 |
| 324 | ACUCCCCU G CCCCUCCU | 878 | AGGAGGGC GGAGGAAACUCC CU UCAAGGACAUCGUCCGGG AGGCCACU | 2458 |
| 333 | GCCCUCCU C GACCAGCU | 879 | ACCUCCUC GGAGGAAACUCC CU UCAAGGACAUCGUCCGCG AGGAGGGC | 2459 |
| 334 | CCCUCCUG C ACCACCUG | 880 | CAGCUCCU CGAGGAAACUCC CU UCAAGGACAUCGUCCGCG CAGGAGGG | 2460 |
| 342 | GAGCACCU G GACCUCAG | 881 | CUGAGGUC GGAGGAAACUCC CU UCAAGGACAUCGUCCGGG AGCUGCUC | 2461 |
| 343 | AGCACCUG G ACCUCACC | 882 | GCUCAGCU CGACGAAACUCC CU UCAAGGACAUCCUCCCGG CACCUGCU | 2462 |
| 352 | ACCUCAGC G AUAAUGCA | 883 | UCCAUUAU CCAGCAAACUCC CU UCAAGCACAUCCUCCCGG GCUGAGGU | 2463 |
| 368 | ACAGCUCC C GUCUGUGG | 884 | CCACAGAC GGAGGAAACUCC CU UCAAGGACAUCGUCCGGG GGAGCUGU | 2464 |
| 375 | CGCUCUCU C GACCCUGC | 885 | GCACCCUC GGAGCAAACUCC CU UCAACCACAUCGUCCGCG ACAGACCG | 2465 |
| 376 | GGUCUGUG C ACCCUGCC | 886 | CGCAGGGU GGAGGAAACUCC CU UCAAGGACAUCGUCCGGG CACACACC | 2466 |
| 394 | CAUUCCAC C GCCUCGCC | 887 | GCCCACCC GCAGGAAACUCC CU UCAAGGACAUCGUCCGGG GUGGAAUG | 2467 |
| 399 | CACGGCCU G GGCCGCCU | 888 | AGGCGGCC GGAGGAAACUCC CU UCAAGGACAUCGUCCGGG AGGCCGUG | 2468 |
| 400 | ACGGCCUG G GCCGCCUA | 889 | UAGGCGGC GGAGGAAACUCC CU UCAAGGACAUCGUCCGGG CAGGCCGU | 2469 |
| 423 | CUGCACCU G GACCGCUG | 890 | CAGCGGUC GGAGGAAACUCC CU UCAAGGACAUCGUCCGGG AGGUGCAG | 2470 |
| 424 | UGCACCUG G ACCGCUGC | 891 | GCAGCGGU GGAGGAAACUCC CU UCAAGGACAUCGUCCGGG CAGGUGCA | 2471 |
| 433 | ACCGCUGC G GCCUGCAG | 892 | CUGCAGGC GGAGGAAACUCC CU UCAAGGACAUCGUCCGGG GCAGCGGU | 2472 |
| 441 | GGCCUGCA G GAGCUGGG | 893 | CCCAGCUC GGAGGAAACUCC CU UCAAGGACAUCGUCCGGG UGCAGGCC | 2473 |
| 442 | GCCUGCAG G AGCUGGGC | 894 | GCCCAGCU GGAGGAAACUCC CU UCAAGGACAUCGUCCGGG CUGCAGGC | 2474 |
| 447 | CAGGAGCU G GGCCCGGG | 895 | CCCGGGCC GGAGGAAACUCC CU UCAAGGACAUCGUCCGGG AGCUCCUG | 2475 |
| 448 | AGGAGCUG G GCCCGGGG | 896 | CCCCGGGC GGAGGAAACUCC CU UCAAGGACAUCGUCCGGG CAGCUCCU | 2476 |
| 453 | CUGGGCCC G GGGCUGUU | 897 | AACAGCCC GGAGGAAACUCC CU UCAAGGACAUCGUCCGGG GGGCCCAG | 2477 |
| 454 | UGGGCCCG G GGCUGUUC | 898 | GAACAGCC GGAGGAAACUCC CU UCAAGGACAUCGUCCGGG CGGGCCCA | 2478 |
| 455 | GGGCCCGG G GCUGUUCC | 899 | GGAACAGC GGAGGAAACUCC CU UCAAGGACAUCGUCCGGG CCGGGCCC | 2479 |
| 466 | UGUUCCGC G GCCUGGCU | 900 | AGCCAGGC GGAGGAAACUCC CU UCAAGGACAUCGUCCGGG GCGGAACA | 2480 |
| 471 | CGCGGCCU G GCUGCCCU | 901 | AGGGCAGC GGAGGAAACUCC CU UCAAGGACAUCGUCCGGG AGGCCGCG | 2481 |
| 498 | UACCUGCA G GACAACGC | 902 | GCGUUGUC GGAGGAAACUCC CU UCAAGGACAUCGUCCGGG UGCAGGUA | 2482 |
| 499 | ACCUGCAG G ACAACGCG | 903 | CGCGUUGU GGAGGAAACUCC CU UCAAGGACAUCGUCCGGG CUGCAGGU | 2483 |
| 513 | GCGCUGCA G GCACUGCC | 904 | GGCAGUGC GGAGGAAACUCC CU UCAAGGACAUCGUCCGGG UGCAGCGC | 2484 |
| 523 | CACUGCCU G AUGACACC | 905 | GGUGUCAU GGAGGAAACUCC CU UCAAGGACAUCGUCCGGG AGGCAGUG | 2485 |
| 526 | UGCCUGAU G ACACCUUC | 906 | GAAGGUGU GGAGGAAACUCC CU UCAAGGACAUCGUCCGGG AUCAGGCA | 2486 |
| 538 | CCUUCCGC G ACCUGGGC | 907 | GCCCAGGU GGAGGAAACUCC CU UCAAGGACAUCGUCCGGG GCGGAAGG | 2487 |
| 543 | CGCGACCU G GGCAACCU | 908 | AGGUUGCC GGAGGAAACUCC CU UCAAGGACAUCGUCCGGG AGGUCGCG | 2488 |
| 544 | GCGACCUG G GCAACCUC | 909 | GAGGUUGC GGAGGAAACUCC CU UCAAGGACAUCGUCCGGG CAGGUCGC | 2489 |
| 595 | GCGUGCCC G AGCGCGCC | 910 | GGCGCGCU GGAGGAAACUCC CU UCAAGGACAUCGUCCGGG GGGCACGC | 2490 |
| 610 | CCUUCCGU G GGCUGCAC | 911 | GUGCAGCC GGAGGAAACUCC CU UCAAGGACAUCGUCCGGG ACGGAAGG | 2491 |
| 611 | CUUCCGUG G GCUGCACA | 912 | UGUGCAGC GGAGGAAACUCC CU UCAAGGACAUCGUCCGGG CACGGAAG | 2492 |
| 625 | ACAGCCUC G ACCGUCUC | 913 | GAGACGGU GGAGGAAACUCC CU UCAAGGACAUCGUCCGGG GAGGCUGU | 2493 |
| 645 | CUGCACCA G AACCGCGU | 914 | ACGCGGUU GGAGGAAACUCC CU UCAAGGACAUCGUCCGGG UGGUGCAG | 2494 |
| 654 | AACCGCGU G GCCCAUGU | 915 | ACAUGGGC GGAGGAAACUCC CU UCAAGGACAUCGUCCGGG ACGCGGUU | 2495 |
| 682 | CCUUCCGU G ACCUUGGC | 916 | GCCAAGGU GGAGGAAACUCC CU UCAAGGACAUCGUCCGGG ACGGAAGG | 2496 |
| 688 | GUGACCUU G GCCGCCUC | 917 | GAGGCGGC GGAGGAAACUCC CU UCAAGGACAUCGUCCGGG AAGGUCAC | 2497 |
| 699 | CGCCUCAU G ACACUCUA | 918 | UAGAGUGU GGAGGAAACUCC CU UCAAGGACAUCGUCCGGG AUGAGGCG | 2498 |
| 742 | UGCCCACU G AGGCCCUG | 919 | CAGGGCCU GGAGGAAACUCC CU UCAAGGACAUCGUCCGGG AGUGGGCA | 2499 |
| 744 | CCCACUGA G GCCCUGGC | 920 | GCCAGGGC GGAGGAAACUCC CU UCAAGGACAUCGUCCGGG UCAGUGGG | 2500 |
| 750 | GAGGCCCU G GCCCCCCU | 921 | AGGGGGGC GGAGGAAACUCC CU UCAAGGACAUCGUCCGGG AGGGCCUC | 2501 |
| 777 | CAGUACCU G AGGCUCAA | 922 | UUGAGCCU GGAGGAAACUCC CU UCAAGGACAUCGUCCGGG AGGUACUG | 2502 |
| 779 | GUACCUGA G GCUCAACG | 923 | CGUUGAGC GGAGGAAACUCC CU UCAAGGACAUCGUCCGGG UCAGGUAC | 2503 |
| 787 | GGCUCAAC G ACAACCCC | 924 | GGGGUUGU GGAGGAAACUCC CU UCAAGGACAUCGUCCGGG GUUGAGCC | 2504 |
| 797 | CAACCCCU G GGUGUGUG | 925 | CACACACC GGAGGAAACUCC CU UCAAGGACAUCGUCCGGG AGGGGUUG | 2505 |
| 798 | AACCCCUG G GUGUGUGA | 926 | UCACACAC GGAGGAAACUCC CU UCAAGGACAUCGUCCGGG CAGGGGUU | 2506 |
| 805 | GGGUGUGU G ACUGCCGG | 927 | CCGGCAGU GGAGGAAACUCC CU UCAAGGACAUCGUCCGGG ACACACCC | 2507 |
| 812 | UGACUGCC G GGCACGCC | 928 | GGCGUGCC GGAGGAAACUCC CU UCAAGGACAUCGUCCGGG GGCAGUCA | 2508 |
| 813 | GACUGCCG G GCACGCCC | 929 | GGGCGUGC GGAGGAAACUCC CU UCAAGGACAUCGUCCGGG CGGCAGUC | 2509 |
| 827 | CCCACUCU G GGCCUGGC | 930 | GCCAGGCC GGAGGAAACUCC CU UCAAGGACAUCGUCCGGG AGAGUGGG | 2510 |
| 828 | CCACUCUG G GCCUGGCU | 931 | AGCCAGGC GGAGGAAACUCC CU UCAAGGACAUCGUCCGGG CAGAGUGG | 2511 |
| 833 | CUGGGCCU G GCUGCAGA | 932 | UCUGCAGC GGAGGAAACUCC CU UCAAGGACAUCGUCCGGG AGGCCCAG | 2512 |
| 840 | UGGCUGCA G AAGUUCCG | 933 | CGGAACUU GGAGGAAACUCC CU UCAAGGACAUCGUCCGGG UGCAGCCA | 2513 |
| 850 | AGUUCCGC G GCUCCUCC | 934 | GGAGGAGC GGAGGAAACUCC CU UCAAGGACAUCGUCCGGG GCGGAACU | 2514 |
| 862 | CCUCCUCC G AGGUGCCC | 935 | GGGCACCU GGAGGAAACUCC CU UCAAGGACAUCGUCCGGG GGAGGAGG | 2515 |
| 864 | UCCUCCGA G GUGCCCUG | 936 | CAGGGCAC GGAGGAAACUCC CU UCAAGGACAUCGUCCGGG UCGGAGGA | 2516 |
| 891 | CAACGCCU G GCUGGCCG | 937 | CGGCCAGC GGAGGAAACUCC CU UCAAGGACAUCGUCCGGG AGGCGUUG | 2517 |
| 895 | GCCUGGCU G GCCGUGAC | 938 | GUCACGGC GGAGGAAACUCC CU UCAAGGACAUCGUCCGGG AGCCAGGC | 2518 |
| 901 | CUGGCCGU G ACCUCAAA | 939 | UUUGAGGU GGAGGAAACUCC CU UCAAGGACAUCGUCCGGG ACGGCCAG | 2519 |
| 925 | CUGCCAAU G ACCUGCAG | 940 | CUGCAGGU GGAGGAAACUCC CU UCAAGGACAUCGUCCGGG AUUGGCAG | 2520 |
| 933 | GACCUGCA G GGCUGCGC | 941 | GCGCAGCC GGAGGAAACUCC CU UCAAGGACAUCGUCCGGG UGCAGGUC | 2521 |
| 934 | ACCUGCAG G GCUGCGCU | 942 | AGCGCAGC GGAGGAAACUCC CU UCAAGGACAUCGUCCGGG CUGCAGCU | 2522 |
| 945 | UGCGCUGU G GCCACCGG | 943 | CCGGUGGC GGAGGAAACUCC CU UCAAGGACAUCGUCCGGG ACAGCGCA | 2523 |
| 952 | UGGCCACC G GCCCUUAC | 944 | GUAAGGGC GGAGGAAACUCC CU UCAAGGACAUCGUCCGGG GGUGGCCA | 2524 |
| 971 | UCCCAUCU G GACCGGCA | 945 | UGCCGGUC GGAGGAAACUCC CU UCAAGGACAUCGUCCGGG AGAUGGGA | 2525 |
| 972 | CCCAUCUG G ACCGGCAG | 946 | CUGCCGGU GGAGGAAACUCC CU UCAAGGACAUCGUCCGGG CAGAUGGG | 2526 |
| 976 | UCUGGACC G GCAGGGCC | 947 | GGCCCUGC GGAGGAAACUCC CU UCAAGGACAUCGUCCGGG GGUCCAGA | 2527 |
| 980 | GACCGGCA G GGCCACCG | 948 | CGGUGGCC GGAGGAAACUCC CU UCAAGGACAUCGUCCGGG UGCCGGUC | 2528 |
| 981 | ACCGGCAG G GCCACCGA | 949 | UCGGUGGC GGAGGAAACUCC CU UCAAGGACAUCGUCCGGG CUGCCGGU | 2529 |
| 988 | GGGCCACC G AUGAGGAG | 950 | CUCCUCAU GGAGGAAACUCC CU UCAAGGACAUCGUCCGGG GGUGGCCC | 2530 |
| 991 | CCACCGAU G AGGAGCCG | 951 | CGGCUCCU GGAGGAAACUCC CU UCAAGGACAUCGUCCGGG AUCGGUGG | 2531 |
| 993 | ACCGAUGA G GAGCCGCU | 952 | AGCGGCUC GGAGGAAACUCC CU UCAAGGACAUCGUCCGGG UCAUCGGU | 2532 |
| 994 | CCGAUGAG G AGCCGCUG | 953 | CAGCGGCU GGAGGAAACUCC CU UCAAGGACAUCGUCCGGG CUCAUCGG | 2533 |
| 1002 | GAGCCGCU G GGGCUUCC | 954 | GGAAGCCC GGAGGAAACUCC CU UCAAGGACAUCGUCCGGG AGCGGCUC | 2534 |
| 1003 | AGCCGCUG G GGCUUCCC | 955 | GGGAAGCC GGAGGAAACUCC CU UCAAGGACAUCGUCCGGG CAGCGGCU | 2535 |
| 1004 | GCCGCUGG G GCUUCCCA | 956 | UGGGAAGC GGAGGAAACUCC CU UCAAGGACAUCGUCCGGG CCAGCGGC | 2536 |
| 1027 | GCCAGCCA G AUGCCGCU | 957 | AGCGGCAU GGAGGAAACUCC CU UCAAGGACAUCGUCCGGG UGGCUGGC | 2537 |
| 1036 | AUGCCGCU G ACAAGGCC | 958 | GGCCUUGU GGAGGAAACUCC CU UCAAGGACAUCGUCCGGG AGCGGCAU | 2538 |
| 1041 | GCUGACAA G GCCUCAGU | 959 | ACUGAGGC GGAGGAAACUCC CU UCAAGGACAUCGUCCGGG UUGUCAGC | 2539 |
| 1053 | UCAGUACU G GAGCCUGG | 960 | CCAGGCUC GGAGGAAACUCC CU UCAAGGACAUCGUCCGGG AGUACUGA | 2540 |
| 1054 | CAGUACUG G AGCCUGGA | 961 | UCCAGGCU GGAGGAAACUCC CU UCAAGGACAUCGUCCGGG CAGUACUG | 2541 |
| 1060 | UGGAGCCU G GAAGACCA | 962 | UGGUCUUC GGAGGAAACUCC CU UCAAGGACAUCGUCCGGG AGGCUCCA | 2542 |
| 1061 | GGAGCCUG G AAGACCAG | 963 | CUGGUCUU GGAGGAAACUCC CU UCAAGGACAUCGUCCGGG CAGGCUCC | 2543 |
| 1064 | GCCUGGAA G ACCAGCUU | 964 | AAGCUGGU GGAGGAAACUCC CU UCAAGGACAUCGUCCGGG UUCCAGGC | 2544 |
| 1074 | CCAGCUUC G GCAGGCAA | 965 | UUGCCUGC GGAGGAAACUCC CU UCAAGGACAUCGUCCGGG GAAGCUGG | 2545 |
| 1078 | CUUCGGCA G GCAAUGCG | 966 | CGCAUUGC GGAGGAAACUCC CU UCAAGGACAUCGUCCGGG UGCCGAAG | 2546 |
| 1089 | AAUGCGCU G AAGGGACG | 967 | CGUCCCUU GGAGGAAACUCC CU UCAAGGACAUCGUCCGGG AGCGCAUU | 2547 |
| 1092 | GCGCUGAA G GGACGCGU | 968 | ACGCGUCC GGAGGAAACUCC CU UCAAGGACAUCGUCCGGG UUCAGCGC | 2548 |
| 1093 | CGCUGAAG G GACGCGUG | 969 | CACGCGUC GGAGGAAACUCC CU UCAAGGACAUCGUCCGGG CUUCAGCG | 2549 |
| 1094 | GCUGAAGG G ACGCGUGC | 970 | GCACGCGU GGAGGAAACUCC CU UCAAGGACAUCGUCCGGG CCUUCAGC | 2550 |
| 1108 | UGCCGCCC G GUGACAGC | 971 | GCUGUCAC GGAGGAAACUCC CU UCAAGGACAUCGUCCGGG GGGCGGCA | 2551 |
| 1111 | CGCCCGGU G ACAGCCCG | 972 | CGGGCUGU GGAGGAAACUCC CU UCAAGGACAUCGUCCGGG ACCGGGCG | 2552 |
| 1122 | AGCCCGCC G GGCAACGG | 973 | CCGUUGCC GGAGGAAACUCC CU UCAAGGACAUCGUCCGGG GGCGGGCU | 2553 |
| 1123 | GCCCGCCG G GCAACGGC | 974 | GCCGUUGC GGAGGAAACUCC CU UCAAGGACAUCGUCCGGG CGGCGGGC | 2554 |
| 1129 | CGGGCAAC G GCUCUGGC | 975 | GCCAGAGC GGAGGAAACUCC CU UCAAGGACAUCGUCCGGG GUUGCCCG | 2555 |
| 1135 | ACGGCUCU G GCCCACGG | 976 | CCGUGGGC GGAGGAAACUCC CU UCAAGGACAUCGUCCGGG AGAGCCGU | 2556 |
| 1142 | UGGCCCAC G GCACAUCA | 977 | UGAUGUGC GGAGGAAACUCC CU UCAAGGACAUCGUCCGGG GUGGGCCA | 2557 |
| 1153 | ACAUCAAU G ACUCACCC | 978 | GGGUGAGU GGAGGAAACUCC CU UCAAGGACAUCGUCCGGG AUUGAUGU | 2558 |
| 1165 | CACCCUUU G GGACUCUG | 979 | CAGAGUCC GGAGGAAACUCC CU UCAAGGACAUCGUCCGGG AAAGGGUG | 2559 |
| 1166 | ACCCUUUG G GACUCUGC | 980 | GCAGAGUC GGAGGAAACUCC CU UCAAGGACAUCGUCCGGG CAAAGGGU | 2560 |
| 1167 | CCCUUUGG G ACUCUGCC | 981 | GGCAGAGU GGAGGAAACUCC CU UCAAGGACAUCGUCCGGG CCAAAGGG | 2561 |
| 1177 | CUCUGCCU G GCUCUGCU | 982 | AGCAGAGC GGAGGAAACUCC CU UCAAGGACAUCGUCCGGG AGGCAGAG | 2562 |
| 1186 | GCUCUGCU G AGCCCCCG | 983 | CUGGGGCU GGAGGAAACUCC CU UCAAGGACAUCGUCCGGG AGCAGAGC | 2563 |
| 1208 | UGCAGUGC G GCCCGAGG | 984 | CCUCGGGC GGAGGAAACUCC CU UCAAGGACAUCGUCCGGG GCACUGCA | 2564 |
| 1213 | UGCGGCCC G AGGGCUCC | 985 | GGAGCCCU GGAGGAAACUCC CU UCAAGGACAUCGUCCGGG GGGCCGCA | 2565 |
| 1215 | CGGCCCGA G GGCUCCGA | 986 | UCGGAGCC GGAGGAAACUCC CU UCAAGGACAUCGUCCGGG UCGGGCCG | 2566 |
| 1216 | GGCCCGAG G GCUCCGAG | 987 | CUCGGAGC GGAGGAAACUCC CU UCAAGGACAUCGUCCGGG CUCGGGCC | 2567 |
| 1222 | AGGGCUCC G AGCCACCA | 988 | UGGUGGCU GGAGGAAACUCC CU UCAAGGACAUCGUCCGGG GGAGCCCU | 2568 |
| 1231 | AGCCACCA G GGUUCCCC | 989 | GGGGAACC GGAGGAAACUCC CU UCAAGGACAUCGUCCGGG UGGUGGCU | 2569 |
| 1232 | GCCACCAG G GUUCCCCA | 990 | UGGGGAAC GGAGGAAACUCC CU UCAAGGACAUCGUCCGGG CUGGUGGC | 2570 |
| 1245 | CCCACCUC G GGCCCUCG | 991 | CGAGGGCC GGAGGAAACUCC CU UCAAGGACAUCGUCCGGG GAGGUGGG | 2571 |
| 1246 | CCACCUCG G GCCCUCGC | 992 | GCGAGGGC GGAGGAAACUCC CU UCAAGGACAUCGUCCGGG CGAGGUGG | 2572 |
| 1256 | CCCUCGCC G GAGGCCAG | 993 | CUGGCCUC GGAGGAAACUCC CU UCAAGGACAUCGUCCGGG GGCGAGGG | 2573 |
| 1257 | CCUCGCCG G AGGCCAGG | 994 | CCUGGCCU GGAGGAAACUCC CU UCAAGGACAUCGUCCGGG CGGCGAGG | 2574 |
| 1259 | UCGCCGGA G GCCAGGCU | 995 | AGCCUGGC GGAGGAAACUCC CU UCAAGGACAUCGUCCGGG UCCGGCGA | 2575 |
| 1264 | GGAGGCCA G GCUGUUCA | 996 | UGAACAGC GGAGGAAACUCC CU UCAAGGACAUCGUCCGGG UGGCCUCC | 2576 |
| 1278 | UCACGCAA G AACCGCAC | 997 | GUGCGGUU GGAGGAAACUCC CU UCAAGGACAUCGUCCGGG UUGCGUGA | 2577 |
| 1305 | UGCCGUCU G GGCCAGGC | 998 | GCCUGGCC GGAGGAAACUCC CU UCAAGGACAUCGUCCGGG AGACGGCA | 2578 |
| 1306 | GCCGUCUG G GCCAGGCA | 999 | UGCCUGGC GGAGGAAACUCC CU UCAAGGACAUCGUCCGGG CAGACGGC | 2579 |
| 1311 | CUGGGCCA G GCAGGCAG | 1000 | CUGCCUGC GGAGGAAACUCC CU UCAAGGACAUCGUCCGGG UGGCCCAG | 2580 |
| 1315 | GCCAGGCA G GCAGCGGG | 1001 | CCCGCUGC GGAGGAAACUCC CU UCAAGCACAUCGUCCGGG UGCCUGGC | 2581 |
| 1321 | CAGGCACC G GGGCUCGC | 1002 | GCCACCCC GGAGGAAACUCC CU UCAAGGACAUCGUCCGGG GCUCCCUG | 2582 |
| 1322 | AGGCAGCG G GGGUGGCG | 1003 | CGCCACCC GGAGGAAACUCC CU UCAAGGACAUCGUCCGGG CGCUGCCU | 2583 |
| 1323 | GGCAGCGG G GGUGGCGG | 1004 | CCGCCACC GGAGGAAACUCC CU UCAAGGACAUCGUCCGGG CCGCUGCC | 2584 |
| 1324 | GCAGCGGG G GUGGCGGG | 1005 | CCCGCCAC GGAGGAAACUCC CU UCAAGGACAUCGUCCGGG CCCGCUGC | 2585 |
| 1327 | GCGGGGGU G GCGGGACU | 1006 | AGUCCCGC GGAGGAAACUCC CU UCAAGGACAUCGUCCGGG ACCCCCGC | 2586 |
| 1330 | GGGGUGGC G GGACUGGU | 1007 | ACCAGUCC GGAGGAAACUCC CU UCAAGGACAUCGUCCGGG GCCACCCC | 2587 |
| 1331 | GGGUGGCG G GACUGGUG | 1008 | GACCAGUC GGAGGAAACUCC CU UCAAGGACAUCGUCCGGG CGCCACCC | 2588 |
| 1332 | GGUGGCGG G ACUGGUGA | 1009 | UCACCAGU GGAGGAAACUCC CU UCAAGGACAUCGUCCGGG CCGCCACC | 2589 |
| 1336 | GCGGGACU G GUGACUCA | 1010 | UGAGUCAC GGAGGAAACUCC CU UCAAGGACAUCGUCCGGG AGUCCCGC | 2590 |
| 1339 | GGACUGGU G ACUCAGAA | 1011 | UUCUGAGU GGAGGAAACUCC CU UCAAGGACAUCGUCCGGG ACCAGUCC | 2591 |
| 1345 | GUGACUCA G AAGGCUCA | 1012 | UGAGCCUU GGAGGAAACUCC CU UCAAGGACAUCGUCCGGG UGAGUCAC | 2592 |
| 1348 | ACUCAGAA G GCUCAGGU | 1013 | ACCUGAGC GGAGGAAACUCC CU UCAAGGACAUCGUCCGGG UUCUGAGU | 2593 |
| 1354 | AAGGCUCA G GUGCCCUA | 1014 | UAGGGCAC GGAGGAAACUCC CU UCAAGGACAUCGUCCGGG UGAGCCUU | 2594 |
| 1392 | ACCCCCCU G GGCCUGGC | 1015 | GCCAGGCC GGAGGAAACUCC CU UCAAGGACAUCGUCCGGG AGGGGGGU | 2595 |
| 1393 | CCCCCCUG G GCCUGGCG | 1016 | CGCCAGGC GGAGGAAACUCC CU UCAAGGACAUCGUCCGGG CAGGGGGG | 2596 |
| 1398 | CUGGGCCU G GCGCUGGU | 1017 | ACCAGCGC GGAGGAAACUCC CU UCAAGGACAUCGUCCGGG AGGCCCAG | 2597 |
| 1404 | CUGGCGCU G GUGCUGUG | 1018 | CACAGCAC GGAGGAAACUCC CU UCAAGGACAUCGUCCGGG AGCGCCAG | 2598 |
| 1412 | GGUGCUGU G GACAGUGC | 1019 | GCACUGUC GGAGGAAACUCC CU UCAAGGACAUCGUCCGGG ACAGCACC | 2599 |
| 1413 | GUGCUGUG G ACAGUGCU | 1020 | AGCACUGU GGAGGAAACUCC CU UCAAGGACAUCGUCCGGG CACAGCAC | 2600 |
| 1423 | CAGUGCUU G GGCCCUGC | 1021 | GCAGGGCC GGAGGAAACUCC CU UCAAGGACAUCGUCCGGG AAGCACUG | 2601 |
| 1424 | AGUGCUUG G GCCCUGCU | 1022 | AGCAGGGC GGAGGAAACUCC CU UCAAGGACAUCGUCCGGG CAAGCACU | 2602 |
| 1433 | GCCCUGCU G ACCCCCAG | 1023 | CUGGGGGU GGAGGAAACUCC CU UCAAGGACAUCGUCCGGG AGCAGGGC | 2603 |

Input Sequence = AF283463. Cut Site = G/.
Arm Length = 8. Core Sequence = GGAGGAAACUCC CU UCAAGGACAUCGUCCGGG
AF283463 (Homo sapiens Nogo receptor mRNA, complete cds.; 1441 bp)

What we claim is:

1. A nucleic acid aptamer that specifically binds to a NOGO receptor protein or a portion thereof.

2. The nucleic acid aptamer of claim 1, wherein said nucleic acid aptamer modulates NOGO receptor activity.

3. The nucleic acid aptamer of claim 1, wherein said nucleic acid aptamer disrupts interaction of NOGO and NOGO receptor.

4. The nucleic acid aptamer of claim 1, wherein said nucleic acid aptamer is chemically synthesized.

5. The nucleic acid aptamer of claim 1, wherein said nucleic acid aptamer comprises at least one nucleic acid sugar modification.

6. The nucleic acid aptamer of claim 1, wherein said nucleic acid aptamer comprises at least one nucleic acid base modification.

7. The nucleic acid aptamer of claim 1, wherein said nucleic acid aptamer comprises at least one nucleic acid backbone modification.

8. The nucleic acid aptamer of claim 1, wherein said nucleic acid aptamer is an RNA molecule.

9. The nucleic acid aptamer of claim 1, wherein said nucleic acid aptamer is a DNA molecule.

10. A composition comprising the nucleic acid aptamer of claim 1 and a pharmaceutically acceptable carrier or diluent.

The application's sequence listing, which the Patent Office published only in electronic form, follows.

SEQUENCE LISTING (2617 sequences)

SEQ ID NO: 1 - RNA, 17 nt, Homo sapiens
caaccccuacgaugaag

SEQ ID NO: 2 - RNA, 17 nt, Homo sapiens
gagggcguccgcuggag

SEQ ID NO: 3 - RNA, 17 nt, Homo sapiens
gccugcguaugcuacaa

SEQ ID NO: 4 - RNA, 17 nt, Homo sapiens
cguaugcuacaaugagc

SEQ ID NO: 5 - RNA, 17 nt, Homo sapiens
gugggcaucccugcugc

SEQ ID NO: 6 - RNA, 17 nt, Homo sapiens
cagcgcaucuuccugca

SEQ ID NO: 7 - RNA, 17 nt, Homo sapiens
gcgcaucuuccugcacg

SEQ ID NO: 8 - RNA, 17 nt, Homo sapiens
cgcaucuuccugcacgg

SEQ ID NO: 9 - RNA, 17 nt, Homo sapiens
aaccgcaucucgcaugu

SEQ ID NO: 10 - RNA, 17 nt, Homo sapiens
ccgcaucucgcaugugc

SEQ ID NO: 11 - RNA, 17 nt, Homo sapiens
ugccagcuuccgugccu

SEQ ID NO: 12 - RNA, 17 nt, Homo sapiens
gccagcuuccgugccug

SEQ ID NO: 13 - RNA, 17 nt, Homo sapiens
cgcaaccucaccauccu

SEQ ID NO: 14 - RNA, 17 nt, Homo sapiens
cucaccauccuguggcu

SEQ ID NO: 15 - RNA, 17 nt, Homo sapiens
gcugcacucgaaugugc

SEQ ID NO: 16 - RNA, 17 nt, Homo sapiens
gcccgaauugaugcggc

SEQ ID NO: 17 - RNA, 17 nt, Homo sapiens
ggcugccuucacuggcc

SEQ ID NO: 18 - RNA, 17 nt, Homo sapiens
gcugccuucacuggccu

SEQ ID NO: 19 - RNA, 17 nt, Homo sapiens
cuggcccuccuggagca

SEQ ID NO: 20 - RNA, 17 nt, Homo sapiens
cuggaccucagcgauaa

SEQ ID NO: 21 - RNA, 17 nt, Homo sapiens
ucagcgauaaugcacag

SEQ ID NO: 22 - RNA, 17 nt, Homo sapiens
gcacagcuccggucugu

SEQ ID NO: 23 - RNA, 17 nt, Homo sapiens
gcuccggucuguggacc

SEQ ID NO: 24 - RNA, 17 nt, Homo sapiens
ugccacauuccacggcc

SEQ ID NO: 25 - RNA, 17 nt, Homo sapiens
gccacauuccacggccu

SEQ ID NO: 26 - RNA, 17 nt, Homo sapiens
ggccgccuacacacgcu

SEQ ID NO: 27 - RNA, 17 nt, Homo sapiens
ggggcuguuccgcggcc

SEQ ID NO: 28 - RNA, 17 nt, Homo sapiens
gggcuguuccgcggccu

SEQ ID NO: 29 - RNA, 17 nt, Homo sapiens
ccugcaguaccucuacc

SEQ ID NO: 30 - RNA, 17 nt, Homo sapiens
caguaccucuaccugca

SEQ ID NO: 31 - RNA, 17 nt, Homo sapiens
guaccucuaccugcagg

SEQ ID NO: 32 - RNA, 17 nt, Homo sapiens
ugacaccuuccgcgacc

SEQ ID NO: 33 - RNA, 17 nt, Homo sapiens
gacaccuuccgcgaccu

SEQ ID NO: 34 - RNA, 17 nt, Homo sapiens
ggcaaccucacacaccu

SEQ ID NO: 35 - RNA, 17 nt, Homo sapiens
acacaccucuuccugca

SEQ ID NO: 36 - RNA, 17 nt, Homo sapiens
acaccucuuccugcacg

SEQ ID NO: 37 - RNA, 17 nt, Homo sapiens
caccucuuccugcacgg

SEQ ID NO: 38 - RNA, 17 nt, Homo sapiens
aaccgcaucuccagcgu

SEQ ID NO: 39 - RNA, 17 nt, Homo sapiens
ccgcaucuccagcgugc

SEQ ID NO: 40 - RNA, 17 nt, Homo sapiens
gcgcgccuuccgugggc

SEQ ID NO: 41 - RNA, 17 nt, Homo sapiens
cgcgccuuccgugggcu

SEQ ID NO: 42 - RNA, 17 nt, Homo sapiens
cacagccucgaccgucu

SEQ ID NO: 43 - RNA, 17 nt, Homo sapiens
ucgaccgucuccuacug

SEQ ID NO: 44 - RNA, 17 nt, Homo sapiens
gaccgucuccuacugca

SEQ ID NO: 45 - RNA, 17 nt, Homo sapiens
cgucuccuacugcacca

SEQ ID NO: 46 - RNA, 17 nt, Homo sapiens
gcaugccuuccgugacc

SEQ ID NO: 47 - RNA, 17 nt, Homo sapiens
caugccuuccgugaccu

SEQ ID NO: 48 - RNA, 17 nt, Homo sapiens
cgugaccuuggccgccu

SEQ ID NO: 49 - RNA, 17 nt, Homo sapiens
ggccgccucaugacacu

SEQ ID NO: 50 - RNA, 17 nt, Homo sapiens
augacacucuaucuguu

SEQ ID NO: 51 - RNA, 17 nt, Homo sapiens
gacacucuaucuguuug

SEQ ID NO: 52 - RNA, 17 nt, Homo sapiens
cacucuaucuguuugcc

SEQ ID NO: 53 - RNA, 17 nt, Homo sapiens
cuaucuguuugccaaca

SEQ ID NO: 54 - RNA, 17 nt, Homo sapiens
uaucuguuugccaacaa

SEQ ID NO: 55 - RNA, 17 nt, Homo sapiens
ccaacaaucuaucagcg

SEQ ID NO: 56 - RNA, 17 nt, Homo sapiens
aacaaucuaucagcgcu

SEQ ID NO: 57 - RNA, 17 nt, Homo sapiens
caaucuaucagcgcugc

SEQ ID NO: 58 - RNA, 17 nt, Homo sapiens
ccugcaguaccugaggc

SEQ ID NO: 59 - RNA, 17 nt, Homo sapiens
cugaggcucaacgacaa

SEQ ID NO: 60 - RNA, 17 nt, Homo sapiens
cgcccacucugggccug

SEQ ID NO: 61 - RNA, 17 nt, Homo sapiens
gcagaaguuccgcggcu

SEQ ID NO: 62 - RNA, 17 nt, Homo sapiens
cagaaguuccgcggcuc

SEQ ID NO: 63 - RNA, 17 nt, Homo sapiens
ccgcggcuccuccuccg

SEQ ID NO: 64 - RNA, 17 nt, Homo sapiens
cggcuccuccuccgagg

SEQ ID NO: 65 - RNA, 17 nt, Homo sapiens
cuccuccuccgaggugc

SEQ ID NO: 66 - RNA, 17 nt, Homo sapiens
ugcagccucccgcaacg

SEQ ID NO: 67 - RNA, 17 nt, Homo sapiens
cgugaccucaaacgccu

SEQ ID NO: 68 - RNA, 17 nt, Homo sapiens
aaacgccuagcugccaa

SEQ ID NO: 69 - RNA, 17 nt, Homo sapiens
ccggcccuuaccauccc

SEQ ID NO: 70 - RNA, 17 nt, Homo sapiens
cggcccuuaccauccca

SEQ ID NO: 71 - RNA, 17 nt, Homo sapiens
cuuaccaucccaucugg

SEQ ID NO: 72 - RNA, 17 nt, Homo sapiens
caucccaucuggaccgg

SEQ ID NO: 73 - RNA, 17 nt, Homo sapiens
cuggggcuucccaagug

SEQ ID NO: 74 - RNA, 17 nt, Homo sapiens
uggggcuucccaagugc

SEQ ID NO: 75 - RNA, 17 nt, Homo sapiens
caaggccucaguacugg

SEQ ID NO: 76 - RNA, 17 nt, Homo sapiens
gccucaguacuggagcc

SEQ ID NO: 77 - RNA, 17 nt, Homo sapiens
gaccagcuucggcaggc

SEQ ID NO: 78 - RNA, 17 nt, Homo sapiens
accagcuucggcaggca

SEQ ID NO: 79 - RNA, 17 nt, Homo sapiens
caacggcucuggcccac

SEQ ID NO: 80 - RNA, 17 nt, Homo sapiens
cggcacaucaaugacuc

SEQ ID NO: 81 - RNA, 17 nt, Homo sapiens
caaugacucacccuuug

SEQ ID NO: 82 - RNA, 17 nt, Homo sapiens
cucacccuuugggacuc

SEQ ID NO: 83 - RNA, 17 nt, Homo sapiens
ucacccuuugggacucu

SEQ ID NO: 84 - RNA, 17 nt, Homo sapiens
uugggacucugccuggc

SEQ ID NO: 85 - RNA, 17 nt, Homo sapiens
gccuggcucugcugagc

SEQ ID NO: 86 - RNA, 17 nt, Homo sapiens
cccccgcucacugcagu

SEQ ID NO: 87 - RNA, 17 nt, Homo sapiens
cgagggcuccgagccac

SEQ ID NO: 88 - RNA, 17 nt, Homo sapiens
accaggguuccccaccu

SEQ ID NO: 89 - RNA, 17 nt, Homo sapiens
ccaggguuccccaccuc

SEQ ID NO: 90 - RNA, 17 nt, Homo sapiens
ccccaccucgggcccuc

SEQ ID NO: 91 - RNA, 17 nt, Homo sapiens
cgggcccucgccggagg

SEQ ID NO: 92 - RNA, 17 nt, Homo sapiens
caggcuguucacgcaag

SEQ ID NO: 93 - RNA, 17 nt, Homo sapiens
aggcuguucacgcaaga

SEQ ID NO: 94 - RNA, 17 nt, Homo sapiens
acugccgucugggccag

SEQ ID NO: 95 - RNA, 17 nt, Homo sapiens
uggugacucagaaggcu

SEQ ID NO: 96 - RNA, 17 nt, Homo sapiens
agaaggcucaggugccc

SEQ ID NO: 97 - RNA, 17 nt, Homo sapiens
ggugcccuacccagccu

SEQ ID NO: 98 - RNA, 17 nt, Homo sapiens
cccagccucaccugcag

SEQ ID NO: 99 - RNA, 17 nt, Homo sapiens
ugcagccucaccccccu

SEQ ID NO: 100 - RNA, 17 nt, Homo sapiens
acagugcuugggcccug

SEQ ID NO: 101 - RNA, 17 nt, Homo sapiens
ccaaccccuacgaugaa

SEQ ID NO: 102 - RNA, 17 nt, Homo sapiens
agggcguccgcuggagg

SEQ ID NO: 103 - RNA, 17 nt, Homo sapiens
gcguccgcuggagggag

SEQ ID NO: 104 - RNA, 17 nt, Homo sapiens
gagggagccggcugcug

SEQ ID NO: 105 - RNA, 17 nt, Homo sapiens
gagccggcugcuggcau

SEQ ID NO: 106 - RNA, 17 nt, Homo sapiens
ccggcugcuggcauggg

SEQ ID NO: 107 - RNA, 17 nt, Homo sapiens
cugcuggcaugggugcu

SEQ ID NO: 108 - RNA, 17 nt, Homo sapiens
augggugcuguggcugc

SEQ ID NO: 109 - RNA, 17 nt, Homo sapiens
gcuguggcugcaggccu

SEQ ID NO: 110 - RNA, 17 nt, Homo sapiens
guggcugcaggccuggc

SEQ ID NO: 111 - RNA, 17 nt, Homo sapiens
cugcaggccuggcaggu

SEQ ID NO: 112 - RNA, 17 nt, Homo sapiens
ugcaggccuggcaggug

SEQ ID NO: 113 - RNA, 17 nt, Homo sapiens
ggccuggcagguggcag

SEQ ID NO: 114 - RNA, 17 nt, Homo sapiens
cagguggcagccccaug

SEQ ID NO: 115 - RNA, 17 nt, Homo sapiens
guggcagccccaugccc

SEQ ID NO: 116 - RNA, 17 nt, Homo sapiens
uggcagccccaugccca

SEQ ID NO: 117 - RNA, 17 nt, Homo sapiens
ggcagccccaugcccag

SEQ ID NO: 118 - RNA, 17 nt, Homo sapiens
gcagccccaugcccagg

SEQ ID NO: 119 - RNA, 17 nt, Homo sapiens
ccccaugcccaggugcc

SEQ ID NO: 120 - RNA, 17 nt, Homo sapiens
cccaugcccaggugccu

SEQ ID NO: 121 - RNA, 17 nt, Homo sapiens
ccaugcccaggugccug

SEQ ID NO: 122 - RNA, 17 nt, Homo sapiens
ccaggugccugcguaug

SEQ ID NO: 123 - RNA, 17 nt, Homo sapiens
caggugccugcguaugc

SEQ ID NO: 124 - RNA, 17 nt, Homo sapiens
gcguaugcuacaaugag

SEQ ID NO: 125 - RNA, 17 nt, Homo sapiens
uaugcuacaaugagccc

SEQ ID NO: 126 - RNA, 17 nt, Homo sapiens
caaugagcccaagguga

SEQ ID NO: 127 - RNA, 17 nt, Homo sapiens
aaugagcccaaggugac

SEQ ID NO: 128 - RNA, 17 nt, Homo sapiens
augagcccaaggugacg

SEQ ID NO: 129 - RNA, 17 nt, Homo sapiens
gugacgacaagcugccc

SEQ ID NO: 130 - RNA, 17 nt, Homo sapiens
cgacaagcugcccccag

SEQ ID NO: 131 - RNA, 17 nt, Homo sapiens
caagcugcccccagcag

SEQ ID NO: 132 - RNA, 17 nt, Homo sapiens
aagcugcccccagcagg

SEQ ID NO: 133 - RNA, 17 nt, Homo sapiens
agcugcccccagcaggg

SEQ ID NO: 134 - RNA, 17 nt, Homo sapiens
gcugcccccagcagggc

SEQ ID NO: 135 - RNA, 17 nt, Homo sapiens
cugcccccagcagggcc

SEQ ID NO: 136 - RNA, 17 nt, Homo sapiens
cccccagcagggccugc

SEQ ID NO: 137 - RNA, 17 nt, Homo sapiens
agcagggccugcaggcu

SEQ ID NO: 138 - RNA, 17 nt, Homo sapiens
gcagggccugcaggcug

SEQ ID NO: 139 - RNA, 17 nt, Homo sapiens
gggccugcaggcugugc

SEQ ID NO: 140 - RNA, 17 nt, Homo sapiens
cugcaggcugugcccgu

SEQ ID NO: 141 - RNA, 17 nt, Homo sapiens
ggcugugcccgugggca

SEQ ID NO: 142 - RNA, 17 nt, Homo sapiens
gcugugcccgugggcau

SEQ ID NO: 143 - RNA, 17 nt, Homo sapiens
ccgugggcaucccugcu

SEQ ID NO: 144 - RNA, 17 nt, Homo sapiens
ugggcaucccugcugcc

SEQ ID NO: 145 - RNA, 17 nt, Homo sapiens
gggcaucccugcugcca

SEQ ID NO: 146 - RNA, 17 nt, Homo sapiens
ggcaucccugcugccag

SEQ ID NO: 147 - RNA, 17 nt, Homo sapiens
aucccugcugccagcca

SEQ ID NO: 148 - RNA, 17 nt, Homo sapiens
ccugcugccagccagcg

SEQ ID NO: 149 - RNA, 17 nt, Homo sapiens
cugcugccagccagcgc

SEQ ID NO: 150 - RNA, 17 nt, Homo sapiens
cugccagccagcgcauc

SEQ ID NO: 151 - RNA, 17 nt, Homo sapiens
ugccagccagcgcaucu

SEQ ID NO: 152 - RNA, 17 nt, Homo sapiens
gccagcgcaucuuccug

SEQ ID NO: 153 - RNA, 17 nt, Homo sapiens
agcgcaucuuccugcac

SEQ ID NO: 154 - RNA, 17 nt, Homo sapiens
gcaucuuccugcacggc

SEQ ID NO: 155 - RNA, 17 nt, Homo sapiens
caucuuccugcacggca

SEQ ID NO: 156 - RNA, 17 nt, Homo sapiens
cuuccugcacggcaacc

SEQ ID NO: 157 - RNA, 17 nt, Homo sapiens
ugcacggcaaccgcauc

SEQ ID NO: 158 - RNA, 17 nt, Homo sapiens
acggcaaccgcaucucg

SEQ ID NO: 159 - RNA, 17 nt, Homo sapiens
gcaaccgcaucucgcau

SEQ ID NO: 160 - RNA, 17 nt, Homo sapiens
accgcaucucgcaugug

SEQ ID NO: 161 - RNA, 17 nt, Homo sapiens
caucucgcaugugccag

SEQ ID NO: 162 - RNA, 17 nt, Homo sapiens
gcaugugccagcugcca

SEQ ID NO: 163 - RNA, 17 nt, Homo sapiens
caugugccagcugccag

SEQ ID NO: 164 - RNA, 17 nt, Homo sapiens
gugccagcugccagcuu

SEQ ID NO: 165 - RNA, 17 nt, Homo sapiens
ccagcugccagcuuccg

SEQ ID NO: 166 - RNA, 17 nt, Homo sapiens
cagcugccagcuuccgu

SEQ ID NO: 167 - RNA, 17 nt, Homo sapiens
cugccagcuuccgugcc

SEQ ID NO: 168 - RNA, 17 nt, Homo sapiens
ccagcuuccgugccugc

SEQ ID NO: 169 - RNA, 17 nt, Homo sapiens
uuccgugccugccgcaa

SEQ ID NO: 170 - RNA, 17 nt, Homo sapiens
uccgugccugccgcaac

SEQ ID NO: 171 - RNA, 17 nt, Homo sapiens
gugccugccgcaaccuc

SEQ ID NO: 172 - RNA, 17 nt, Homo sapiens
ccugccgcaaccucacc

SEQ ID NO: 173 - RNA, 17 nt, Homo sapiens
gccgcaaccucaccauc

SEQ ID NO: 174 - RNA, 17 nt, Homo sapiens
ccgcaaccucaccaucc

SEQ ID NO: 175 - RNA, 17 nt, Homo sapiens
gcaaccucaccauccug

SEQ ID NO: 176 - RNA, 17 nt, Homo sapiens
aaccucaccauccugug

SEQ ID NO: 177 - RNA, 17 nt, Homo sapiens
accucaccauccugugg

SEQ ID NO: 178 - RNA, 17 nt, Homo sapiens
ucaccauccuguggcug

SEQ ID NO: 179 - RNA, 17 nt, Homo sapiens
caccauccuguggcugc

SEQ ID NO: 180 - RNA, 17 nt, Homo sapiens
ccuguggcugcacucga

SEQ ID NO: 181 - RNA, 17 nt, Homo sapiens
guggcugcacucgaaug

SEQ ID NO: 182 - RNA, 17 nt, Homo sapiens
ggcugcacucgaaugug

SEQ ID NO: 183 - RNA, 17 nt, Homo sapiens
gaaugugcuggcccgaa

SEQ ID NO: 184 - RNA, 17 nt, Homo sapiens
gugcuggcccgaauuga

SEQ ID NO: 185 - RNA, 17 nt, Homo sapiens
ugcuggcccgaauugau

SEQ ID NO: 186 - RNA, 17 nt, Homo sapiens
gaugcggcugccuucac

SEQ ID NO: 187 - RNA, 17 nt, Homo sapiens
gcggcugccuucacugg

SEQ ID NO: 188 - RNA, 17 nt, Homo sapiens
cggcugccuucacuggc

SEQ ID NO: 189 - RNA, 17 nt, Homo sapiens
cugccuucacuggccug

SEQ ID NO: 190 - RNA, 17 nt, Homo sapiens
gccuucacuggccuggc

SEQ ID NO: 191 - RNA, 17 nt, Homo sapiens
ucacuggccuggcccuc

SEQ ID NO: 192 - RNA, 17 nt, Homo sapiens
cacuggccuggcccucc

SEQ ID NO: 193 - RNA, 17 nt, Homo sapiens
ggccuggcccuccugga

SEQ ID NO: 194 - RNA, 17 nt, Homo sapiens
gccuggcccuccuggag

SEQ ID NO: 195 - RNA, 17 nt, Homo sapiens
ccuggcccuccuggagc

SEQ ID NO: 196 - RNA, 17 nt, Homo sapiens
uggcccuccuggagcag

SEQ ID NO: 197 - RNA, 17 nt, Homo sapiens
ggcccuccuggagcagc

SEQ ID NO: 198 - RNA, 17 nt, Homo sapiens
ccuggagcagcuggacc

SEQ ID NO: 199 - RNA, 17 nt, Homo sapiens
ggagcagcuggaccuca

SEQ ID NO: 200 - RNA, 17 nt, Homo sapiens
agcuggaccucagcgau

SEQ ID NO: 201 - RNA, 17 nt, Homo sapiens
gcuggaccucagcgaua

SEQ ID NO: 202 - RNA, 17 nt, Homo sapiens
uggaccucagcgauaau

SEQ ID NO: 203 - RNA, 17 nt, Homo sapiens
gauaaugcacagcuccg

SEQ ID NO: 204 - RNA, 17 nt, Homo sapiens
uaaugcacagcuccggu

SEQ ID NO: 205 - RNA, 17 nt, Homo sapiens
ugcacagcuccggucug

SEQ ID NO: 206 - RNA, 17 nt, Homo sapiens
cacagcuccggucugug

SEQ ID NO: 207 - RNA, 17 nt, Homo sapiens
cuccggucuguggaccc

SEQ ID NO: 208 - RNA, 17 nt, Homo sapiens
cuguggacccugccaca

SEQ ID NO: 209 - RNA, 17 nt, Homo sapiens
uguggacccugccacau

SEQ ID NO: 210 - RNA, 17 nt, Homo sapiens
guggacccugccacauu

SEQ ID NO: 211 - RNA, 17 nt, Homo sapiens
gacccugccacauucca

SEQ ID NO: 212 - RNA, 17 nt, Homo sapiens
acccugccacauuccac

SEQ ID NO: 213 - RNA, 17 nt, Homo sapiens
ccugccacauuccacgg

SEQ ID NO: 214 - RNA, 17 nt, Homo sapiens
ccacauuccacggccug

SEQ ID NO: 215 - RNA, 17 nt, Homo sapiens
cacauuccacggccugg

SEQ ID NO: 216 - RNA, 17 nt, Homo sapiens
uccacggccugggccgc

SEQ ID NO: 217 - RNA, 17 nt, Homo sapiens
ccacggccugggccgcc

SEQ ID NO: 218 - RNA, 17 nt, Homo sapiens
gccugggccgccuacac

SEQ ID NO: 219 - RNA, 17 nt, Homo sapiens
ugggccgccuacacacg

SEQ ID NO: 220 - RNA, 17 nt, Homo sapiens
gggccgccuacacacgc

SEQ ID NO: 221 - RNA, 17 nt, Homo sapiens
ccgccuacacacgcugc

SEQ ID NO: 222 - RNA, 17 nt, Homo sapiens
gccuacacacgcugcac

SEQ ID NO: 223 - RNA, 17 nt, Homo sapiens
acacacgcugcaccugg

SEQ ID NO: 224 - RNA, 17 nt, Homo sapiens
cacgcugcaccuggacc

SEQ ID NO: 225 - RNA, 17 nt, Homo sapiens
cgcugcaccuggaccgc

SEQ ID NO: 226 - RNA, 17 nt, Homo sapiens
gcugcaccuggaccgcu

SEQ ID NO: 227 - RNA, 17 nt, Homo sapiens
accuggaccgcugcggc

SEQ ID NO: 228 - RNA, 17 nt, Homo sapiens
uggaccgcugcggccug

SEQ ID NO: 229 - RNA, 17 nt, Homo sapiens
gcugcggccugcaggag

SEQ ID NO: 230 - RNA, 17 nt, Homo sapiens
cugcggccugcaggagc

SEQ ID NO: 231 - RNA, 17 nt, Homo sapiens
cggccugcaggagcugg

SEQ ID NO: 232 - RNA, 17 nt, Homo sapiens
gcaggagcugggcccgg

SEQ ID NO: 233 - RNA, 17 nt, Homo sapiens
agcugggcccggggcug

SEQ ID NO: 234 - RNA, 17 nt, Homo sapiens
gcugggcccggggcugu

SEQ ID NO: 235 - RNA, 17 nt, Homo sapiens
cccggggcuguuccgcg

SEQ ID NO: 236 - RNA, 17 nt, Homo sapiens
ggcuguuccgcggccug

SEQ ID NO: 237 - RNA, 17 nt, Homo sapiens
uccgcggccuggcugcc

SEQ ID NO: 238 - RNA, 17 nt, Homo sapiens
ccgcggccuggcugccc

SEQ ID NO: 239 - RNA, 17 nt, Homo sapiens
ggccuggcugcccugca

SEQ ID NO: 240 - RNA, 17 nt, Homo sapiens
cuggcugcccugcagua

SEQ ID NO: 241 - RNA, 17 nt, Homo sapiens
uggcugcccugcaguac

SEQ ID NO: 242 - RNA, 17 nt, Homo sapiens
ggcugcccugcaguacc

SEQ ID NO: 243 - RNA, 17 nt, Homo sapiens
ugcccugcaguaccucu

SEQ ID NO: 244 - RNA, 17 nt, Homo sapiens
ugcaguaccucuaccug

SEQ ID NO: 245 - RNA, 17 nt, Homo sapiens
gcaguaccucuaccugc

SEQ ID NO: 246 - RNA, 17 nt, Homo sapiens
aguaccucuaccugcag

SEQ ID NO: 247 - RNA, 17 nt, Homo sapiens
accucuaccugcaggac

SEQ ID NO: 248 - RNA, 17 nt, Homo sapiens
ccucuaccugcaggaca

SEQ ID NO: 249 - RNA, 17 nt, Homo sapiens
cuaccugcaggacaacg

SEQ ID NO: 250 - RNA, 17 nt, Homo sapiens
ugcaggacaacgcgcug

SEQ ID NO: 251 - RNA, 17 nt, Homo sapiens
caacgcgcugcaggcac

SEQ ID NO: 252 - RNA, 17 nt, Homo sapiens
cgcgcugcaggcacugc

SEQ ID NO: 253 - RNA, 17 nt, Homo sapiens
cugcaggcacugccuga

SEQ ID NO: 254 - RNA, 17 nt, Homo sapiens
gcaggcacugccugaug

SEQ ID NO: 255 - RNA, 17 nt, Homo sapiens
ggcacugccugaugaca

SEQ ID NO: 256 - RNA, 17 nt, Homo sapiens
gcacugccugaugacac

SEQ ID NO: 257 - RNA, 17 nt, Homo sapiens
cugaugacaccuuccgc

SEQ ID NO: 258 - RNA, 17 nt, Homo sapiens
gaugacaccuuccgcga

SEQ ID NO: 259 - RNA, 17 nt, Homo sapiens
augacaccuuccgcgac

SEQ ID NO: 260 - RNA, 17 nt, Homo sapiens
acaccuuccgcgaccug

SEQ ID NO: 261 - RNA, 17 nt, Homo sapiens
uccgcgaccugggcaac

SEQ ID NO: 262 - RNA, 17 nt, Homo sapiens
ccgcgaccugggcaacc

SEQ ID NO: 263 - RNA, 17 nt, Homo sapiens
accugggcaaccucaca

SEQ ID NO: 264 - RNA, 17 nt, Homo sapiens
ugggcaaccucacacac

SEQ ID NO: 265 - RNA, 17 nt, Homo sapiens
gggcaaccucacacacc

SEQ ID NO: 266 - RNA, 17 nt, Homo sapiens
gcaaccucacacaccuc

SEQ ID NO: 267 - RNA, 17 nt, Homo sapiens
aaccucacacaccucuu

SEQ ID NO: 268 - RNA, 17 nt, Homo sapiens
ccucacacaccucuucc

SEQ ID NO: 269 - RNA, 17 nt, Homo sapiens
ucacacaccucuuccug

SEQ ID NO: 270 - RNA, 17 nt, Homo sapiens
cacacaccucuuccugc

SEQ ID NO: 271 - RNA, 17 nt, Homo sapiens
cacaccucuuccugcac

SEQ ID NO: 272 - RNA, 17 nt, Homo sapiens
accucuuccugcacggc

SEQ ID NO: 273 - RNA, 17 nt, Homo sapiens
ccucuuccugcacggca

SEQ ID NO: 274 - RNA, 17 nt, Homo sapiens
acggcaaccgcaucucc

SEQ ID NO: 275 - RNA, 17 nt, Homo sapiens
gcaaccgcaucuccagc

SEQ ID NO: 276 - RNA, 17 nt, Homo sapiens
accgcaucuccagcgug

SEQ ID NO: 277 - RNA, 17 nt, Homo sapiens
cgcaucuccagcgugcc

SEQ ID NO: 278 - RNA, 17 nt, Homo sapiens
gcaucuccagcgugccc

SEQ ID NO: 279 - RNA, 17 nt, Homo sapiens
cagcgugcccgagcgcg

SEQ ID NO: 280 - RNA, 17 nt, Homo sapiens
agcgugcccgagcgcgc

SEQ ID NO: 281 - RNA, 17 nt, Homo sapiens
gagcgcgccuuccgugg

SEQ ID NO: 282 - RNA, 17 nt, Homo sapiens
agcgcgccuuccguggg

SEQ ID NO: 283 - RNA, 17 nt, Homo sapiens
gcgccuuccgugggcug

SEQ ID NO: 284 - RNA, 17 nt, Homo sapiens
ccgugggcugcacagcc

SEQ ID NO: 285 - RNA, 17 nt, Homo sapiens
ugggcugcacagccucg

SEQ ID NO: 286 - RNA, 17 nt, Homo sapiens
ggcugcacagccucgac

SEQ ID NO: 287 - RNA, 17 nt, Homo sapiens
ugcacagccucgaccgu

SEQ ID NO: 288 - RNA, 17 nt, Homo sapiens
gcacagccucgaccguc

SEQ ID NO: 289 - RNA, 17 nt, Homo sapiens
gccucgaccgucuccua

SEQ ID NO: 290 - RNA, 17 nt, Homo sapiens
cgaccgucuccuacugc

SEQ ID NO: 291 - RNA, 17 nt, Homo sapiens
accgucuccuacugcac

SEQ ID NO: 292 - RNA, 17 nt, Homo sapiens
ccgucuccuacugcacc

SEQ ID NO: 293 - RNA, 17 nt, Homo sapiens
ucuccuacugcaccaga

SEQ ID NO: 294 - RNA, 17 nt, Homo sapiens
ccuacugcaccagaacc

SEQ ID NO: 295 - RNA, 17 nt, Homo sapiens
uacugcaccagaaccgc

SEQ ID NO: 296 - RNA, 17 nt, Homo sapiens
acugcaccagaaccgcg

SEQ ID NO: 297 - RNA, 17 nt, Homo sapiens
accagaaccgcguggcc

SEQ ID NO: 298 - RNA, 17 nt, Homo sapiens
cgcguggcccaugugca

SEQ ID NO: 299 - RNA, 17 nt, Homo sapiens
gcguggcccaugugcac

SEQ ID NO: 300 - RNA, 17 nt, Homo sapiens
cguggcccaugugcacc

SEQ ID NO: 301 - RNA, 17 nt, Homo sapiens
ccaugugcacccgcaug

SEQ ID NO: 302 - RNA, 17 nt, Homo sapiens
augugcacccgcaugcc

SEQ ID NO: 303 - RNA, 17 nt, Homo sapiens
ugugcacccgcaugccu

SEQ ID NO: 304 - RNA, 17 nt, Homo sapiens
gcacccgcaugccuucc

SEQ ID NO: 305 - RNA, 17 nt, Homo sapiens
ccgcaugccuuccguga

SEQ ID NO: 306 - RNA, 17 nt, Homo sapiens
cgcaugccuuccgugac

SEQ ID NO: 307 - RNA, 17 nt, Homo sapiens
augccuuccgugaccuu

SEQ ID NO: 308 - RNA, 17 nt, Homo sapiens
uccgugaccuuggccgc

SEQ ID NO: 309 - RNA, 17 nt, Homo sapiens
ccgugaccuuggccgcc

SEQ ID NO: 310 - RNA, 17 nt, Homo sapiens
accuuggccgccucaug

SEQ ID NO: 311 - RNA, 17 nt, Homo sapiens
uuggccgccucaugaca

SEQ ID NO: 312 - RNA, 17 nt, Homo sapiens
uggccgccucaugacac

SEQ ID NO: 313 - RNA, 17 nt, Homo sapiens
gccgccucaugacacuc

SEQ ID NO: 314 - RNA, 17 nt, Homo sapiens
cucaugacacucuaucu

SEQ ID NO: 315 - RNA, 17 nt, Homo sapiens
caugacacucuaucugu

SEQ ID NO: 316 - RNA, 17 nt, Homo sapiens
ugacacucuaucuguuu

SEQ ID NO: 317 - RNA, 17 nt, Homo sapiens
acucuaucuguuugcca

SEQ ID NO: 318 - RNA, 17 nt, Homo sapiens
cuguuugccaacaaucu

SEQ ID NO: 319 - RNA, 17 nt, Homo sapiens
uguuugccaacaaucua

SEQ ID NO: 320 - RNA, 17 nt, Homo sapiens
uugccaacaaucuauca

SEQ ID NO: 321 - RNA, 17 nt, Homo sapiens
caacaaucuaucagcgc

SEQ ID NO: 322 - RNA, 17 nt, Homo sapiens
aaucuaucagcgcugcc

SEQ ID NO: 323 - RNA, 17 nt, Homo sapiens
aucagcgcugcccacug

SEQ ID NO: 324 - RNA, 17 nt, Homo sapiens
agcgcugcccacugagg

SEQ ID NO: 325 - RNA, 17 nt, Homo sapiens
gcgcugcccacugaggc

SEQ ID NO: 326 - RNA, 17 nt, Homo sapiens
cgcugcccacugaggcc

SEQ ID NO: 327 - RNA, 17 nt, Homo sapiens
cugcccacugaggcccu

SEQ ID NO: 328 - RNA, 17 nt, Homo sapiens
acugaggcccuggcccc

SEQ ID NO: 329 - RNA, 17 nt, Homo sapiens
cugaggcccuggccccc

SEQ ID NO: 330 - RNA, 17 nt, Homo sapiens
ugaggcccuggcccccc

SEQ ID NO: 331 - RNA, 17 nt, Homo sapiens
gcccuggccccccugcg

SEQ ID NO: 332 - RNA, 17 nt, Homo sapiens
cccuggccccccugcgu

SEQ ID NO: 333 - RNA, 17 nt, Homo sapiens
ccuggccccccugcgug

SEQ ID NO: 334 - RNA, 17 nt, Homo sapiens
cuggccccccugcgugc

SEQ ID NO: 335 - RNA, 17 nt, Homo sapiens
uggccccccugcgugcc

SEQ ID NO: 336 - RNA, 17 nt, Homo sapiens
ggccccccugcgugccc

SEQ ID NO: 337 - RNA, 17 nt, Homo sapiens
cugcgugcccugcagua

SEQ ID NO: 338 - RNA, 17 nt, Homo sapiens
ugcgugcccugcaguac

SEQ ID NO: 339 - RNA, 17 nt, Homo sapiens
gcgugcccugcaguacc

SEQ ID NO: 340 - RNA, 17 nt, Homo sapiens
ugcccugcaguaccuga

SEQ ID NO: 341 - RNA, 17 nt, Homo sapiens
ugcaguaccugaggcuc

SEQ ID NO: 342 - RNA, 17 nt, Homo sapiens
gcaguaccugaggcuca

SEQ ID NO: 343 - RNA, 17 nt, Homo sapiens
ccugaggcucaacgaca

SEQ ID NO: 344 - RNA, 17 nt, Homo sapiens
ugaggcucaacgacaac

SEQ ID NO: 345 - RNA, 17 nt, Homo sapiens
ucaacgacaaccccugg

SEQ ID NO: 346 - RNA, 17 nt, Homo sapiens
acgacaaccccugggug

SEQ ID NO: 347 - RNA, 17 nt, Homo sapiens
cgacaaccccugggugu

SEQ ID NO: 348 - RNA, 17 nt, Homo sapiens
gacaaccccugggugug

SEQ ID NO: 349 - RNA, 17 nt, Homo sapiens
acaaccccugggugugu

SEQ ID NO: 350 - RNA, 17 nt, Homo sapiens
ugugugacugccgggca

SEQ ID NO: 351 - RNA, 17 nt, Homo sapiens
gugacugccgggcacgc

SEQ ID NO: 352 - RNA, 17 nt, Homo sapiens
ugccgggcacgcccacu

SEQ ID NO: 353 - RNA, 17 nt, Homo sapiens
gggcacgcccacucugg

SEQ ID NO: 354 - RNA, 17 nt, Homo sapiens
ggcacgcccacucuggg

SEQ ID NO: 355 - RNA, 17 nt, Homo sapiens
gcacgcccacucugggc

SEQ ID NO: 356 - RNA, 17 nt, Homo sapiens
acgcccacucugggccu

SEQ ID NO: 357 - RNA, 17 nt, Homo sapiens
gcccacucugggccugg

SEQ ID NO: 358 - RNA, 17 nt, Homo sapiens
cucugggccuggcugca

SEQ ID NO: 359 - RNA, 17 nt, Homo sapiens
ucugggccuggcugcag

SEQ ID NO: 360 - RNA, 17 nt, Homo sapiens
ggccuggcugcagaagu

SEQ ID NO: 361 - RNA, 17 nt, Homo sapiens
cuggcugcagaaguucc

SEQ ID NO: 362 - RNA, 17 nt, Homo sapiens
agaaguuccgcggcucc

SEQ ID NO: 363 - RNA, 17 nt, Homo sapiens
uccgcggcuccuccucc

SEQ ID NO: 364 - RNA, 17 nt, Homo sapiens
cgcggcuccuccuccga

SEQ ID NO: 365 - RNA, 17 nt, Homo sapiens
gcggcuccuccuccgag

SEQ ID NO: 366 - RNA, 17 nt, Homo sapiens
ggcuccuccuccgaggu

SEQ ID NO: 367 - RNA, 17 nt, Homo sapiens
gcuccuccuccgaggug

SEQ ID NO: 368 - RNA, 17 nt, Homo sapiens
uccuccuccgaggugcc

SEQ ID NO: 369 - RNA, 17 nt, Homo sapiens
cgaggugcccugcagcc

SEQ ID NO: 370 - RNA, 17 nt, Homo sapiens
gaggugcccugcagccu

SEQ ID NO: 371 - RNA, 17 nt, Homo sapiens
aggugcccugcagccuc

SEQ ID NO: 372 - RNA, 17 nt, Homo sapiens
ugcccugcagccucccg

SEQ ID NO: 373 - RNA, 17 nt, Homo sapiens
ccugcagccucccgcaa

SEQ ID NO: 374 - RNA, 17 nt, Homo sapiens
cugcagccucccgcaac

SEQ ID NO: 375 - RNA, 17 nt, Homo sapiens
gcagccucccgcaacgc

SEQ ID NO: 376 - RNA, 17 nt, Homo sapiens
cagccucccgcaacgcc

SEQ ID NO: 377 - RNA, 17 nt, Homo sapiens
ccucccgcaacgccugg

SEQ ID NO: 378 - RNA, 17 nt, Homo sapiens
cgcaacgccuggcuggc

SEQ ID NO: 379 - RNA, 17 nt, Homo sapiens
gcaacgccuggcuggcc

SEQ ID NO: 380 - RNA, 17 nt, Homo sapiens
cgccuggcuggccguga

SEQ ID NO: 381 - RNA, 17 nt, Homo sapiens
uggcuggccgugaccuc

SEQ ID NO: 382 - RNA, 17 nt, Homo sapiens
gccgugaccucaaacgc

SEQ ID NO: 383 - RNA, 17 nt, Homo sapiens
ccgugaccucaaacgcc

SEQ ID NO: 384 - RNA, 17 nt, Homo sapiens
gugaccucaaacgccua

SEQ ID NO: 385 - RNA, 17 nt, Homo sapiens
ucaaacgccuagcugcc

SEQ ID NO: 386 - RNA, 17 nt, Homo sapiens
caaacgccuagcugcca

SEQ ID NO: 387 - RNA, 17 nt, Homo sapiens
cgccuagcugccaauga

SEQ ID NO: 388 - RNA, 17 nt, Homo sapiens
cuagcugccaaugaccu

SEQ ID NO: 389 - RNA, 17 nt, Homo sapiens
uagcugccaaugaccug

SEQ ID NO: 390 - RNA, 17 nt, Homo sapiens
ccaaugaccugcagggc

SEQ ID NO: 391 - RNA, 17 nt, Homo sapiens
caaugaccugcagggcu

SEQ ID NO: 392 - RNA, 17 nt, Homo sapiens
ugaccugcagggcugcg

SEQ ID NO: 393 - RNA, 17 nt, Homo sapiens
ugcagggcugcgcugug

SEQ ID NO: 394 - RNA, 17 nt, Homo sapiens
ggcugcgcuguggccac

SEQ ID NO: 395 - RNA, 17 nt, Homo sapiens
gcuguggccaccggccc

SEQ ID NO: 396 - RNA, 17 nt, Homo sapiens
cuguggccaccggcccu

SEQ ID NO: 397 - RNA, 17 nt, Homo sapiens
guggccaccggcccuua

SEQ ID NO: 398 - RNA, 17 nt, Homo sapiens
ccaccggcccuuaccau

SEQ ID NO: 399 - RNA, 17 nt, Homo sapiens
caccggcccuuaccauc

SEQ ID NO: 400 - RNA, 17 nt, Homo sapiens
accggcccuuaccaucc

SEQ ID NO: 401 - RNA, 17 nt, Homo sapiens
gcccuuaccaucccauc

SEQ ID NO: 402 - RNA, 17 nt, Homo sapiens
cccuuaccaucccaucu

SEQ ID NO: 403 - RNA, 17 nt, Homo sapiens
uuaccaucccaucugga

SEQ ID NO: 404 - RNA, 17 nt, Homo sapiens
uaccaucccaucuggac

SEQ ID NO: 405 - RNA, 17 nt, Homo sapiens
accaucccaucuggacc

SEQ ID NO: 406 - RNA, 17 nt, Homo sapiens
aucccaucuggaccggc

SEQ ID NO: 407 - RNA, 17 nt, Homo sapiens
aucuggaccggcagggc

SEQ ID NO: 408 - RNA, 17 nt, Homo sapiens
ggaccggcagggccacc

SEQ ID NO: 409 - RNA, 17 nt, Homo sapiens
ggcagggccaccgauga

SEQ ID NO: 410 - RNA, 17 nt, Homo sapiens
gcagggccaccgaugag

SEQ ID NO: 411 - RNA, 17 nt, Homo sapiens
agggccaccgaugagga

SEQ ID NO: 412 - RNA, 17 nt, Homo sapiens
ugaggagccgcuggggc

SEQ ID NO: 413 - RNA, 17 nt, Homo sapiens
ggagccgcuggggcuuc

SEQ ID NO: 414 - RNA, 17 nt, Homo sapiens
gcuggggcuucccaagu

SEQ ID NO: 415 - RNA, 17 nt, Homo sapiens
ggggcuucccaagugcu

SEQ ID NO: 416 - RNA, 17 nt, Homo sapiens
gggcuucccaagugcug

SEQ ID NO: 417 - RNA, 17 nt, Homo sapiens
ggcuucccaagugcugc

SEQ ID NO: 418 - RNA, 17 nt, Homo sapiens
ccaagugcugccagcca

SEQ ID NO: 419 - RNA, 17 nt, Homo sapiens
agugcugccagccagau

SEQ ID NO: 420 - RNA, 17 nt, Homo sapiens
gugcugccagccagaug

SEQ ID NO: 421 - RNA, 17 nt, Homo sapiens
cugccagccagaugccg

SEQ ID NO: 422 - RNA, 17 nt, Homo sapiens
ugccagccagaugccgc

SEQ ID NO: 423 - RNA, 17 nt, Homo sapiens
ccagaugccgcugacaa

SEQ ID NO: 424 - RNA, 17 nt, Homo sapiens
gaugccgcugacaaggc

SEQ ID NO: 425 - RNA, 17 nt, Homo sapiens
ccgcugacaaggccuca

SEQ ID NO: 426 - RNA, 17 nt, Homo sapiens
gacaaggccucaguacu

SEQ ID NO: 427 - RNA, 17 nt, Homo sapiens
acaaggccucaguacug

SEQ ID NO: 428 - RNA, 17 nt, Homo sapiens
aaggccucaguacugga

SEQ ID NO: 429 - RNA, 17 nt, Homo sapiens
cucaguacuggagccug

SEQ ID NO: 430 - RNA, 17 nt, Homo sapiens
acuggagccuggaagac

SEQ ID NO: 431 - RNA, 17 nt, Homo sapiens
cuggagccuggaagacc

SEQ ID NO: 432 - RNA, 17 nt, Homo sapiens
uggaagaccagcuucgg

SEQ ID NO: 433 - RNA, 17 nt, Homo sapiens
ggaagaccagcuucggc

SEQ ID NO: 434 - RNA, 17 nt, Homo sapiens
agaccagcuucggcagg

SEQ ID NO: 435 - RNA, 17 nt, Homo sapiens
gcuucggcaggcaaugc

SEQ ID NO: 436 - RNA, 17 nt, Homo sapiens
cggcaggcaaugcgcug

SEQ ID NO: 437 - RNA, 17 nt, Homo sapiens
caaugcgcugaagggac

SEQ ID NO: 438 - RNA, 17 nt, Homo sapiens
acgcgugccgcccggug

SEQ ID NO: 439 - RNA, 17 nt, Homo sapiens
cgugccgcccggugaca

SEQ ID NO: 440 - RNA, 17 nt, Homo sapiens
gugccgcccggugacag

SEQ ID NO: 441 - RNA, 17 nt, Homo sapiens
ccggugacagcccgccg

SEQ ID NO: 442 - RNA, 17 nt, Homo sapiens
gugacagcccgccgggc

SEQ ID NO: 443 - RNA, 17 nt, Homo sapiens
ugacagcccgccgggca

SEQ ID NO: 444 - RNA, 17 nt, Homo sapiens
cagcccgccgggcaacg

SEQ ID NO: 445 - RNA, 17 nt, Homo sapiens
cgccgggcaacggcucu

SEQ ID NO: 446 - RNA, 17 nt, Homo sapiens
gcaacggcucuggccca

SEQ ID NO: 447 - RNA, 17 nt, Homo sapiens
aacggcucuggcccacg

SEQ ID NO: 448 - RNA, 17 nt, Homo sapiens
gcucuggcccacggcac

SEQ ID NO: 449 - RNA, 17 nt, Homo sapiens
cucuggcccacggcaca

SEQ ID NO: 450 - RNA, 17 nt, Homo sapiens
ucuggcccacggcacau

SEQ ID NO: 451 - RNA, 17 nt, Homo sapiens
cccacggcacaucaaug

SEQ ID NO: 452 - RNA, 17 nt, Homo sapiens
cacggcacaucaaugac

SEQ ID NO: 453 - RNA, 17 nt, Homo sapiens
ggcacaucaaugacuca

SEQ ID NO: 454 - RNA, 17 nt, Homo sapiens
ucaaugacucacccuuu

SEQ ID NO: 455 - RNA, 17 nt, Homo sapiens
aaugacucacccuuugg

SEQ ID NO: 456 - RNA, 17 nt, Homo sapiens
ugacucacccuuuggga

SEQ ID NO: 457 - RNA, 17 nt, Homo sapiens
gacucacccuuugggac

SEQ ID NO: 458 - RNA, 17 nt, Homo sapiens
acucacccuuugggacu

SEQ ID NO: 459 - RNA, 17 nt, Homo sapiens
uuugggacucugccugg

SEQ ID NO: 460 - RNA, 17 nt, Homo sapiens
ugggacucugccuggcu

SEQ ID NO: 461 - RNA, 17 nt, Homo sapiens
gacucugccuggcucug

SEQ ID NO: 462 - RNA, 17 nt, Homo sapiens
acucugccuggcucugc

SEQ ID NO: 463 - RNA, 17 nt, Homo sapiens
ugccuggcucugcugag

SEQ ID NO: 464 - RNA, 17 nt, Homo sapiens
ccuggcucugcugagcc

SEQ ID NO: 465 - RNA, 17 nt, Homo sapiens
ggcucugcugagccccc

SEQ ID NO: 466 - RNA, 17 nt, Homo sapiens
ugcugagcccccgcuca

SEQ ID NO: 467 - RNA, 17 nt, Homo sapiens
gcugagcccccgcucac

SEQ ID NO: 468 - RNA, 17 nt, Homo sapiens
cugagcccccgcucacu

SEQ ID NO: 469 - RNA, 17 nt, Homo sapiens
ugagcccccgcucacug

SEQ ID NO: 470 - RNA, 17 nt, Homo sapiens
gcccccgcucacugcag

SEQ ID NO: 471 - RNA, 17 nt, Homo sapiens
ccccgcucacugcagug

SEQ ID NO: 472 - RNA, 17 nt, Homo sapiens
ccgcucacugcagugcg

SEQ ID NO: 473 - RNA, 17 nt, Homo sapiens
cucacugcagugcggcc

SEQ ID NO: 474 - RNA, 17 nt, Homo sapiens
agugcggcccgagggcu

SEQ ID NO: 475 - RNA, 17 nt, Homo sapiens
gugcggcccgagggcuc

SEQ ID NO: 476 - RNA, 17 nt, Homo sapiens
ccgagggcuccgagcca

SEQ ID NO: 477 - RNA, 17 nt, Homo sapiens
gagggcuccgagccacc

SEQ ID NO: 478 - RNA, 17 nt, Homo sapiens
cuccgagccaccagggu

SEQ ID NO: 479 - RNA, 17 nt, Homo sapiens
uccgagccaccaggguu

SEQ ID NO: 480 - RNA, 17 nt, Homo sapiens
cgagccaccaggguucc

SEQ ID NO: 481 - RNA, 17 nt, Homo sapiens
gagccaccaggguuccc

SEQ ID NO: 482 - RNA, 17 nt, Homo sapiens
caggguuccccaccucg

SEQ ID NO: 483 - RNA, 17 nt, Homo sapiens
aggguuccccaccucgg

SEQ ID NO: 484 - RNA, 17 nt, Homo sapiens
ggguuccccaccucggg

SEQ ID NO: 485 - RNA, 17 nt, Homo sapiens
gguuccccaccucgggc

SEQ ID NO: 486 - RNA, 17 nt, Homo sapiens
uuccccaccucgggccc

SEQ ID NO: 487 - RNA, 17 nt, Homo sapiens
uccccaccucgggcccu

SEQ ID NO: 488 - RNA, 17 nt, Homo sapiens
ccucgggcccucgccgg

SEQ ID NO: 489 - RNA, 17 nt, Homo sapiens
cucgggcccucgccgga

SEQ ID NO: 490 - RNA, 17 nt, Homo sapiens
ucgggcccucgccggag

SEQ ID NO: 491 - RNA, 17 nt, Homo sapiens
gcccucgccggaggcca

SEQ ID NO: 492 - RNA, 17 nt, Homo sapiens
ccggaggccaggcuguu

SEQ ID NO: 493 - RNA, 17 nt, Homo sapiens
cggaggccaggcuguuc

SEQ ID NO: 494 - RNA, 17 nt, Homo sapiens
ggccaggcuguucacgc

SEQ ID NO: 495 - RNA, 17 nt, Homo sapiens
ggcuguucacgcaagaa

SEQ ID NO: 496 - RNA, 17 nt, Homo sapiens
guucacgcaagaaccgc

SEQ ID NO: 497 - RNA, 17 nt, Homo sapiens
gcaagaaccgcacccgc

SEQ ID NO: 498 - RNA, 17 nt, Homo sapiens
agaaccgcacccgcagc

SEQ ID NO: 499 - RNA, 17 nt, Homo sapiens
aaccgcacccgcagcca

SEQ ID NO: 500 - RNA, 17 nt, Homo sapiens
accgcacccgcagccac

SEQ ID NO: 501 - RNA, 17 nt, Homo sapiens
gcacccgcagccacugc

SEQ ID NO: 502 - RNA, 17 nt, Homo sapiens
cccgcagccacugccgu

SEQ ID NO: 503 - RNA, 17 nt, Homo sapiens
ccgcagccacugccguc

SEQ ID NO: 504 - RNA, 17 nt, Homo sapiens
gcagccacugccgucug

SEQ ID NO: 505 - RNA, 17 nt, Homo sapiens
gccacugccgucugggc

SEQ ID NO: 506 - RNA, 17 nt, Homo sapiens
cugccgucugggccagg

SEQ ID NO: 507 - RNA, 17 nt, Homo sapiens
gucugggccaggcaggc

SEQ ID NO: 508 - RNA, 17 nt, Homo sapiens
ucugggccaggcaggca

SEQ ID NO: 509 - RNA, 17 nt, Homo sapiens
ggccaggcaggcagcgg

SEQ ID NO: 510 - RNA, 17 nt, Homo sapiens
aggcaggcagcgggggu

SEQ ID NO: 511 - RNA, 17 nt, Homo sapiens
ggcgggacuggugacuc

SEQ ID NO: 512 - RNA, 17 nt, Homo sapiens
cuggugacucagaaggc

SEQ ID NO: 513 - RNA, 17 nt, Homo sapiens
ggugacucagaaggcuc

SEQ ID NO: 514 - RNA, 17 nt, Homo sapiens
cagaaggcucaggugcc

SEQ ID NO: 515 - RNA, 17 nt, Homo sapiens
gaaggcucaggugcccu

SEQ ID NO: 516 - RNA, 17 nt, Homo sapiens
ucaggugcccuacccag

SEQ ID NO: 517 - RNA, 17 nt, Homo sapiens
caggugcccuacccagc

SEQ ID NO: 518 - RNA, 17 nt, Homo sapiens
aggugcccuacccagcc

SEQ ID NO: 519 - RNA, 17 nt, Homo sapiens
ugcccuacccagccuca

SEQ ID NO: 520 - RNA, 17 nt, Homo sapiens
gcccuacccagccucac

SEQ ID NO: 521 - RNA, 17 nt, Homo sapiens
cccuacccagccucacc

SEQ ID NO: 522 - RNA, 17 nt, Homo sapiens
uacccagccucaccugc

SEQ ID NO: 523 - RNA, 17 nt, Homo sapiens
acccagccucaccugca

SEQ ID NO: 524 - RNA, 17 nt, Homo sapiens
ccagccucaccugcagc

SEQ ID NO: 525 - RNA, 17 nt, Homo sapiens
agccucaccugcagccu

SEQ ID NO: 526 - RNA, 17 nt, Homo sapiens
gccucaccugcagccuc

SEQ ID NO: 527 - RNA, 17 nt, Homo sapiens
ucaccugcagccucacc

SEQ ID NO: 528 - RNA, 17 nt, Homo sapiens
ccugcagccucaccccc

SEQ ID NO: 529 - RNA, 17 nt, Homo sapiens
cugcagccucacccccc

SEQ ID NO: 530 - RNA, 17 nt, Homo sapiens
gcagccucaccccccug

SEQ ID NO: 531 - RNA, 17 nt, Homo sapiens
agccucaccccccuggg

SEQ ID NO: 532 - RNA, 17 nt, Homo sapiens
gccucaccccccugggc

SEQ ID NO: 533 - RNA, 17 nt, Homo sapiens
ccucaccccccugggcc

SEQ ID NO: 534 - RNA, 17 nt, Homo sapiens
cucaccccccugggccu

SEQ ID NO: 535 - RNA, 17 nt, Homo sapiens
ucaccccccugggccug

SEQ ID NO: 536 - RNA, 17 nt, Homo sapiens
caccccccugggccugg

SEQ ID NO: 537 - RNA, 17 nt, Homo sapiens
cccugggccuggcgcug

SEQ ID NO: 538 - RNA, 17 nt, Homo sapiens
ccugggccuggcgcugg

SEQ ID NO: 539 - RNA, 17 nt, Homo sapiens
ccuggcgcuggugcugu

SEQ ID NO: 540 - RNA, 17 nt, Homo sapiens
gcuggugcuguggacag

SEQ ID NO: 541 - RNA, 17 nt, Homo sapiens
cuguggacagugcuugg

SEQ ID NO: 542 - RNA, 17 nt, Homo sapiens
gacagugcuugggcccu

SEQ ID NO: 543 - RNA, 17 nt, Homo sapiens
gcuugggcccugcugac

SEQ ID NO: 544 - RNA, 17 nt, Homo sapiens
cuugggcccugcugacc

SEQ ID NO: 545 - RNA, 17 nt, Homo sapiens
uugggcccugcugaccc

SEQ ID NO: 546 - RNA, 17 nt, Homo sapiens
ggcccugcugaccccca

SEQ ID NO: 547 - RNA, 17 nt, Homo sapiens
ugaagagggcguccgcu

SEQ ID NO: 548 - RNA, 17 nt, Homo sapiens
aagagggcguccgcugg

SEQ ID NO: 549 - RNA, 17 nt, Homo sapiens
gggcguccgcuggaggg

SEQ ID NO: 550 - RNA, 17 nt, Homo sapiens
uggagggagccggcugc

SEQ ID NO: 551 - RNA, 17 nt, Homo sapiens
gggagccggcugcuggc

SEQ ID NO: 552 - RNA, 17 nt, Homo sapiens
agccggcugcuggcaug

SEQ ID NO: 553 - RNA, 17 nt, Homo sapiens
ggcugcuggcaugggug

SEQ ID NO: 554 - RNA, 17 nt, Homo sapiens
uggcaugggugcugugg

SEQ ID NO: 555 - RNA, 17 nt, Homo sapiens
gcaugggugcuguggcu

SEQ ID NO: 556 - RNA, 17 nt, Homo sapiens
ugggugcuguggcugca

SEQ ID NO: 557 - RNA, 17 nt, Homo sapiens
gugcuguggcugcaggc

SEQ ID NO: 558 - RNA, 17 nt, Homo sapiens
cuguggcugcaggccug

SEQ ID NO: 559 - RNA, 17 nt, Homo sapiens
ggcugcaggccuggcag

SEQ ID NO: 560 - RNA, 17 nt, Homo sapiens
caggccuggcagguggc

SEQ ID NO: 561 - RNA, 17 nt, Homo sapiens
ccuggcagguggcagcc

SEQ ID NO: 562 - RNA, 17 nt, Homo sapiens
ggcagguggcagcccca

SEQ ID NO: 563 - RNA, 17 nt, Homo sapiens
agguggcagccccaugc

SEQ ID NO: 564 - RNA, 17 nt, Homo sapiens
agccccaugcccaggug

SEQ ID NO: 565 - RNA, 17 nt, Homo sapiens
augcccaggugccugcg

SEQ ID NO: 566 - RNA, 17 nt, Homo sapiens
gcccaggugccugcgua

SEQ ID NO: 567 - RNA, 17 nt, Homo sapiens
aggugccugcguaugcu

SEQ ID NO: 568 - RNA, 17 nt, Homo sapiens
gugccugcguaugcuac

SEQ ID NO: 569 - RNA, 17 nt, Homo sapiens
cugcguaugcuacaaug

SEQ ID NO: 570 - RNA, 17 nt, Homo sapiens
uacaaugagcccaaggu

SEQ ID NO: 571 - RNA, 17 nt, Homo sapiens
agcccaaggugacgaca

SEQ ID NO: 572 - RNA, 17 nt, Homo sapiens
gacgacaagcugccccc

SEQ ID NO: 573 - RNA, 17 nt, Homo sapiens
gacaagcugcccccagc

SEQ ID NO: 574 - RNA, 17 nt, Homo sapiens
ugcccccagcagggccu

SEQ ID NO: 575 - RNA, 17 nt, Homo sapiens
ccagcagggccugcagg

SEQ ID NO: 576 - RNA, 17 nt, Homo sapiens
cagggccugcaggcugu

SEQ ID NO: 577 - RNA, 17 nt, Homo sapiens
gccugcaggcugugccc

SEQ ID NO: 578 - RNA, 17 nt, Homo sapiens
ugcaggcugugcccgug

SEQ ID NO: 579 - RNA, 17 nt, Homo sapiens
caggcugugcccguggg

SEQ ID NO: 580 - RNA, 17 nt, Homo sapiens
cugugcccgugggcauc

SEQ ID NO: 581 - RNA, 17 nt, Homo sapiens
gcccgugggcaucccug

SEQ ID NO: 582 - RNA, 17 nt, Homo sapiens
gcaucccugcugccagc

SEQ ID NO: 583 - RNA, 17 nt, Homo sapiens
ucccugcugccagccag

SEQ ID NO: 584 - RNA, 17 nt, Homo sapiens
ugcugccagccagcgca

SEQ ID NO: 585 - RNA, 17 nt, Homo sapiens
gccagccagcgcaucuu

SEQ ID NO: 586 - RNA, 17 nt, Homo sapiens
cagccagcgcaucuucc

SEQ ID NO: 587 - RNA, 17 nt, Homo sapiens
aucuuccugcacggcaa

SEQ ID NO: 588 - RNA, 17 nt, Homo sapiens
ccugcacggcaaccgca

SEQ ID NO: 589 - RNA, 17 nt, Homo sapiens
cggcaaccgcaucucgc

SEQ ID NO: 590 - RNA, 17 nt, Homo sapiens
cgcaucucgcaugugcc

SEQ ID NO: 591 - RNA, 17 nt, Homo sapiens
ucucgcaugugccagcu

SEQ ID NO: 592 - RNA, 17 nt, Homo sapiens
ucgcaugugccagcugc

SEQ ID NO: 593 - RNA, 17 nt, Homo sapiens
augugccagcugccagc

SEQ ID NO: 594 - RNA, 17 nt, Homo sapiens
ugccagcugccagcuuc

SEQ ID NO: 595 - RNA, 17 nt, Homo sapiens
agcugccagcuuccgug

SEQ ID NO: 596 - RNA, 17 nt, Homo sapiens
cagcuuccgugccugcc

SEQ ID NO: 597 - RNA, 17 nt, Homo sapiens
gcuuccgugccugccgc

SEQ ID NO: 598 - RNA, 17 nt, Homo sapiens
ccgugccugccgcaacc

SEQ ID NO: 599 - RNA, 17 nt, Homo sapiens
ugccugccgcaaccuca

SEQ ID NO: 600 - RNA, 17 nt, Homo sapiens
accauccuguggcugca

SEQ ID NO: 601 - RNA, 17 nt, Homo sapiens
auccuguggcugcacuc

SEQ ID NO: 602 - RNA, 17 nt, Homo sapiens
cuguggcugcacucgaa

SEQ ID NO: 603 - RNA, 17 nt, Homo sapiens
acucgaaugugcuggcc

SEQ ID NO: 604 - RNA, 17 nt, Homo sapiens
ucgaaugugcuggcccg

SEQ ID NO: 605 - RNA, 17 nt, Homo sapiens
augugcuggcccgaauu

SEQ ID NO: 606 - RNA, 17 nt, Homo sapiens
gaauugaugcggcugcc

SEQ ID NO: 607 - RNA, 17 nt, Homo sapiens
uugaugcggcugccuuc

SEQ ID NO: 608 - RNA, 17 nt, Homo sapiens
augcggcugccuucacu

SEQ ID NO: 609 - RNA, 17 nt, Homo sapiens
cuucacuggccuggccc

SEQ ID NO: 610 - RNA, 17 nt, Homo sapiens
cuggccuggcccuccug

SEQ ID NO: 611 - RNA, 17 nt, Homo sapiens
cuccuggagcagcugga

SEQ ID NO: 612 - RNA, 17 nt, Homo sapiens
cuggagcagcuggaccu

SEQ ID NO: 613 - RNA, 17 nt, Homo sapiens
ggaccucagcgauaaug

SEQ ID NO: 614 - RNA, 17 nt, Homo sapiens
gcgauaaugcacagcuc

SEQ ID NO: 615 - RNA, 17 nt, Homo sapiens
aaugcacagcuccgguc

SEQ ID NO: 616 - RNA, 17 nt, Homo sapiens
cagcuccggucugugga

SEQ ID NO: 617 - RNA, 17 nt, Homo sapiens
uccggucuguggacccu

SEQ ID NO: 618 - RNA, 17 nt, Homo sapiens
uggacccugccacauuc

SEQ ID NO: 619 - RNA, 17 nt, Homo sapiens
auuccacggccugggcc

SEQ ID NO: 620 - RNA, 17 nt, Homo sapiens
cggccugggccgccuac

SEQ ID NO: 621 - RNA, 17 nt, Homo sapiens
ccugggccgccuacaca

SEQ ID NO: 622 - RNA, 17 nt, Homo sapiens
cuacacacgcugcaccu

SEQ ID NO: 623 - RNA, 17 nt, Homo sapiens
cacacgcugcaccugga

SEQ ID NO: 624 - RNA, 17 nt, Homo sapiens
ccuggaccgcugcggcc

SEQ ID NO: 625 - RNA, 17 nt, Homo sapiens
ggaccgcugcggccugc

SEQ ID NO: 626 - RNA, 17 nt, Homo sapiens
ccgcugcggccugcagg

SEQ ID NO: 627 - RNA, 17 nt, Homo sapiens
ugcggccugcaggagcu

SEQ ID NO: 628 - RNA, 17 nt, Homo sapiens
cugcaggagcugggccc

SEQ ID NO: 629 - RNA, 17 nt, Homo sapiens
ggagcugggcccggggc

SEQ ID NO: 630 - RNA, 17 nt, Homo sapiens
ggcccggggcuguuccg

SEQ ID NO: 631 - RNA, 17 nt, Homo sapiens
ccggggcuguuccgcgg

SEQ ID NO: 632 - RNA, 17 nt, Homo sapiens
gcuguuccgcggccugg

SEQ ID NO: 633 - RNA, 17 nt, Homo sapiens
guuccgcggccuggcug

SEQ ID NO: 634 - RNA, 17 nt, Homo sapiens
gcggccuggcugcccug

SEQ ID NO: 635 - RNA, 17 nt, Homo sapiens
gccuggcugcccugcag

SEQ ID NO: 636 - RNA, 17 nt, Homo sapiens
gcugcccugcaguaccu

SEQ ID NO: 637 - RNA, 17 nt, Homo sapiens
gcccugcaguaccucua

SEQ ID NO: 638 - RNA, 17 nt, Homo sapiens
cucuaccugcaggacaa

SEQ ID NO: 639 - RNA, 17 nt, Homo sapiens
aggacaacgcgcugcag

SEQ ID NO: 640 - RNA, 17 nt, Homo sapiens
gacaacgcgcugcaggc

SEQ ID NO: 641 - RNA, 17 nt, Homo sapiens
aacgcgcugcaggcacu

SEQ ID NO: 642 - RNA, 17 nt, Homo sapiens
cgcugcaggcacugccu

SEQ ID NO: 643 - RNA, 17 nt, Homo sapiens
caggcacugccugauga

SEQ ID NO: 644 - RNA, 17 nt, Homo sapiens
caccuuccgcgaccugg

SEQ ID NO: 645 - RNA, 17 nt, Homo sapiens
cgaccugggcaaccuca

SEQ ID NO: 646 - RNA, 17 nt, Homo sapiens
cucuuccugcacggcaa

SEQ ID NO: 647 - RNA, 17 nt, Homo sapiens
cggcaaccgcaucucca

SEQ ID NO: 648 - RNA, 17 nt, Homo sapiens
caucuccagcgugcccg

SEQ ID NO: 649 - RNA, 17 nt, Homo sapiens
ucuccagcgugcccgag

SEQ ID NO: 650 - RNA, 17 nt, Homo sapiens
uccagcgugcccgagcg

SEQ ID NO: 651 - RNA, 17 nt, Homo sapiens
gugcccgagcgcgccuu

SEQ ID NO: 652 - RNA, 17 nt, Homo sapiens
gcccgagcgcgccuucc

SEQ ID NO: 653 - RNA, 17 nt, Homo sapiens
ccgagcgcgccuuccgu

SEQ ID NO: 654 - RNA, 17 nt, Homo sapiens
cgccuuccgugggcugc

SEQ ID NO: 655 - RNA, 17 nt, Homo sapiens
uuccgugggcugcacag

SEQ ID NO: 656 - RNA, 17 nt, Homo sapiens
cgugggcugcacagccu

SEQ ID NO: 657 - RNA, 17 nt, Homo sapiens
gcugcacagccucgacc

SEQ ID NO: 658 - RNA, 17 nt, Homo sapiens
ccucgaccgucuccuac

SEQ ID NO: 659 - RNA, 17 nt, Homo sapiens
cuccuacugcaccagaa

SEQ ID NO: 660 - RNA, 17 nt, Homo sapiens
ccagaaccgcguggccc

SEQ ID NO: 661 - RNA, 17 nt, Homo sapiens
agaaccgcguggcccau

SEQ ID NO: 662 - RNA, 17 nt, Homo sapiens
accgcguggcccaugug

SEQ ID NO: 663 - RNA, 17 nt, Homo sapiens
uggcccaugugcacccg

SEQ ID NO: 664 - RNA, 17 nt, Homo sapiens
gcccaugugcacccgca

SEQ ID NO: 665 - RNA, 17 nt, Homo sapiens
gugcacccgcaugccuu

SEQ ID NO: 666 - RNA, 17 nt, Homo sapiens
acccgcaugccuuccgu

SEQ ID NO: 667 - RNA, 17 nt, Homo sapiens
ugccuuccgugaccuug

SEQ ID NO: 668 - RNA, 17 nt, Homo sapiens
ugaccuuggccgccuca

SEQ ID NO: 669 - RNA, 17 nt, Homo sapiens
ccuuggccgccucauga

SEQ ID NO: 670 - RNA, 17 nt, Homo sapiens
cucuaucuguuugccaa

SEQ ID NO: 671 - RNA, 17 nt, Homo sapiens
aucuguuugccaacaau

SEQ ID NO: 672 - RNA, 17 nt, Homo sapiens
aucuaucagcgcugccc

SEQ ID NO: 673 - RNA, 17 nt, Homo sapiens
cuaucagcgcugcccac

SEQ ID NO: 674 - RNA, 17 nt, Homo sapiens
ucagcgcugcccacuga

SEQ ID NO: 675 - RNA, 17 nt, Homo sapiens
ccacugaggcccuggcc

SEQ ID NO: 676 - RNA, 17 nt, Homo sapiens
aggcccuggccccccug

SEQ ID NO: 677 - RNA, 17 nt, Homo sapiens
gccccccugcgugcccu

SEQ ID NO: 678 - RNA, 17 nt, Homo sapiens
cccccugcgugcccugc

SEQ ID NO: 679 - RNA, 17 nt, Homo sapiens
cccugcgugcccugcag

SEQ ID NO: 680 - RNA, 17 nt, Homo sapiens
cgugcccugcaguaccu

SEQ ID NO: 681 - RNA, 17 nt, Homo sapiens
gcccugcaguaccugag

SEQ ID NO: 682 - RNA, 17 nt, Homo sapiens
uaccugaggcucaacga

SEQ ID NO: 683 - RNA, 17 nt, Homo sapiens
accccugggugugugac

SEQ ID NO: 684 - RNA, 17 nt, Homo sapiens
cccugggugugugacug

SEQ ID NO: 685 - RNA, 17 nt, Homo sapiens
cugggugugugacugcc

SEQ ID NO: 686 - RNA, 17 nt, Homo sapiens
gugugacugccgggcac

SEQ ID NO: 687 - RNA, 17 nt, Homo sapiens
acugccgggcacgccca

SEQ ID NO: 688 - RNA, 17 nt, Homo sapiens
ccgggcacgcccacucu

SEQ ID NO: 689 - RNA, 17 nt, Homo sapiens
cacucugggccuggcug

SEQ ID NO: 690 - RNA, 17 nt, Homo sapiens
ugggccuggcugcagaa

SEQ ID NO: 691 - RNA, 17 nt, Homo sapiens
gccuggcugcagaaguu

SEQ ID NO: 692 - RNA, 17 nt, Homo sapiens
cugcagaaguuccgcgg

SEQ ID NO: 693 - RNA, 17 nt, Homo sapiens
gaaguuccgcggcuccu

SEQ ID NO: 694 - RNA, 17 nt, Homo sapiens
guuccgcggcuccuccu

SEQ ID NO: 695 - RNA, 17 nt, Homo sapiens
ccuccgaggugcccugc

SEQ ID NO: 696 - RNA, 17 nt, Homo sapiens
uccgaggugcccugcag

SEQ ID NO: 697 - RNA, 17 nt, Homo sapiens
ggugcccugcagccucc

SEQ ID NO: 698 - RNA, 17 nt, Homo sapiens
gcccugcagccucccgc

SEQ ID NO: 699 - RNA, 17 nt, Homo sapiens
agccucccgcaacgccu

SEQ ID NO: 700 - RNA, 17 nt, Homo sapiens
cccgcaacgccuggcug

SEQ ID NO: 701 - RNA, 17 nt, Homo sapiens
aacgccuggcuggccgu

SEQ ID NO: 702 - RNA, 17 nt, Homo sapiens
ccuggcuggccgugacc

SEQ ID NO: 703 - RNA, 17 nt, Homo sapiens
ggcuggccgugaccuca

SEQ ID NO: 704 - RNA, 17 nt, Homo sapiens
ccucaaacgccuagcug

SEQ ID NO: 705 - RNA, 17 nt, Homo sapiens
aacgccuagcugccaau

SEQ ID NO: 706 - RNA, 17 nt, Homo sapiens
gccuagcugccaaugac

SEQ ID NO: 707 - RNA, 17 nt, Homo sapiens
aaugaccugcagggcug

SEQ ID NO: 708 - RNA, 17 nt, Homo sapiens
ccugcagggcugcgcug

SEQ ID NO: 709 - RNA, 17 nt, Homo sapiens
gcagggcugcgcugugg

SEQ ID NO: 710 - RNA, 17 nt, Homo sapiens
agggcugcgcuguggcc

SEQ ID NO: 711 - RNA, 17 nt, Homo sapiens
gcugcgcuguggccacc

SEQ ID NO: 712 - RNA, 17 nt, Homo sapiens
gcgcuguggccaccggc

SEQ ID NO: 713 - RNA, 17 nt, Homo sapiens
ggccaccggcccuuacc

SEQ ID NO: 714 - RNA, 17 nt, Homo sapiens
cuggaccggcagggcca

SEQ ID NO: 715 - RNA, 17 nt, Homo sapiens
ccggcagggccaccgau

SEQ ID NO: 716 - RNA, 17 nt, Homo sapiens
gaugaggagccgcuggg

SEQ ID NO: 717 - RNA, 17 nt, Homo sapiens
gaggagccgcuggggcu

SEQ ID NO: 718 - RNA, 17 nt, Homo sapiens
ccgcuggggcuucccaa

SEQ ID NO: 719 - RNA, 17 nt, Homo sapiens
cuucccaagugcugcca

SEQ ID NO: 720 - RNA, 17 nt, Homo sapiens
ucccaagugcugccagc

SEQ ID NO: 721 - RNA, 17 nt, Homo sapiens
caagugcugccagccag

SEQ ID NO: 722 - RNA, 17 nt, Homo sapiens
ugcugccagccagaugc

SEQ ID NO: 723 - RNA, 17 nt, Homo sapiens
agccagaugccgcugac

SEQ ID NO: 724 - RNA, 17 nt, Homo sapiens
cagaugccgcugacaag

SEQ ID NO: 725 - RNA, 17 nt, Homo sapiens
cugacaaggccucagua

SEQ ID NO: 726 - RNA, 17 nt, Homo sapiens
aggccucaguacuggag

SEQ ID NO: 727 - RNA, 17 nt, Homo sapiens
guacuggagccuggaag

SEQ ID NO: 728 - RNA, 17 nt, Homo sapiens
gaagaccagcuucggca

SEQ ID NO: 729 - RNA, 17 nt, Homo sapiens
cagcuucggcaggcaau

SEQ ID NO: 730 - RNA, 17 nt, Homo sapiens
uucggcaggcaaugcgc

SEQ ID NO: 731 - RNA, 17 nt, Homo sapiens
caggcaaugcgcugaag

SEQ ID NO: 732 - RNA, 17 nt, Homo sapiens
ggcaaugcgcugaaggg

SEQ ID NO: 733 - RNA, 17 nt, Homo sapiens
gaagggacgcgugccgc

SEQ ID NO: 734 - RNA, 17 nt, Homo sapiens
agggacgcgugccgccc

SEQ ID NO: 735 - RNA, 17 nt, Homo sapiens
ggacgcgugccgcccgg

SEQ ID NO: 736 - RNA, 17 nt, Homo sapiens
cgcgugccgcccgguga

SEQ ID NO: 737 - RNA, 17 nt, Homo sapiens
gccgcccggugacagcc

SEQ ID NO: 738 - RNA, 17 nt, Homo sapiens
cggugacagcccgccgg

SEQ ID NO: 739 - RNA, 17 nt, Homo sapiens
gacagcccgccgggcaa

SEQ ID NO: 740 - RNA, 17 nt, Homo sapiens
cccgccgggcaacggcu

SEQ ID NO: 741 - RNA, 17 nt, Homo sapiens
gggcaacggcucuggcc

SEQ ID NO: 742 - RNA, 17 nt, Homo sapiens
cggcucuggcccacggc

SEQ ID NO: 743 - RNA, 17 nt, Homo sapiens
ggcccacggcacaucaa

SEQ ID NO: 744 - RNA, 17 nt, Homo sapiens
gggacucugccuggcuc

SEQ ID NO: 745 - RNA, 17 nt, Homo sapiens
ucugccuggcucugcug

SEQ ID NO: 746 - RNA, 17 nt, Homo sapiens
cuggcucugcugagccc

SEQ ID NO: 747 - RNA, 17 nt, Homo sapiens
ucugcugagcccccgcu

SEQ ID NO: 748 - RNA, 17 nt, Homo sapiens
gagcccccgcucacugc

SEQ ID NO: 749 - RNA, 17 nt, Homo sapiens
cgcucacugcagugcgg

SEQ ID NO: 750 - RNA, 17 nt, Homo sapiens
ucacugcagugcggccc

SEQ ID NO: 751 - RNA, 17 nt, Homo sapiens
acugcagugcggcccga

SEQ ID NO: 752 - RNA, 17 nt, Homo sapiens
gcagugcggcccgaggg

SEQ ID NO: 753 - RNA, 17 nt, Homo sapiens
gcccgagggcuccgagc

SEQ ID NO: 754 - RNA, 17 nt, Homo sapiens
ggcuccgagccaccagg

SEQ ID NO: 755 - RNA, 17 nt, Homo sapiens
ccaccaggguuccccac

SEQ ID NO: 756 - RNA, 17 nt, Homo sapiens
caccucgggcccucgcc

SEQ ID NO: 757 - RNA, 17 nt, Homo sapiens
gggcccucgccggaggc

SEQ ID NO: 758 - RNA, 17 nt, Homo sapiens
cgccggaggccaggcug

SEQ ID NO: 759 - RNA, 17 nt, Homo sapiens
gaggccaggcuguucac

SEQ ID NO: 760 - RNA, 17 nt, Homo sapiens
gccaggcuguucacgca

SEQ ID NO: 761 - RNA, 17 nt, Homo sapiens
cuguucacgcaagaacc

SEQ ID NO: 762 - RNA, 17 nt, Homo sapiens
caagaaccgcacccgca

SEQ ID NO: 763 - RNA, 17 nt, Homo sapiens
ccgcacccgcagccacu

SEQ ID NO: 764 - RNA, 17 nt, Homo sapiens
cacccgcagccacugcc

SEQ ID NO: 765 - RNA, 17 nt, Homo sapiens
cagccacugccgucugg

SEQ ID NO: 766 - RNA, 17 nt, Homo sapiens
ccacugccgucugggcc

SEQ ID NO: 767 - RNA, 17 nt, Homo sapiens
ccgucugggccaggcag

SEQ ID NO: 768 - RNA, 17 nt, Homo sapiens
ugggccaggcaggcagc

SEQ ID NO: 769 - RNA, 17 nt, Homo sapiens
ccaggcaggcagcgggg

SEQ ID NO: 770 - RNA, 17 nt, Homo sapiens
ggcaggcagcgggggug

SEQ ID NO: 771 - RNA, 17 nt, Homo sapiens
cagcggggguggcggga

SEQ ID NO: 772 - RNA, 17 nt, Homo sapiens
cggggguggcgggacug

SEQ ID NO: 773 - RNA, 17 nt, Homo sapiens
cgggacuggugacucag

SEQ ID NO: 774 - RNA, 17 nt, Homo sapiens
cucagaaggcucaggug

SEQ ID NO: 775 - RNA, 17 nt, Homo sapiens
aggcucaggugcccuac

SEQ ID NO: 776 - RNA, 17 nt, Homo sapiens
gcucaggugcccuaccc

SEQ ID NO: 777 - RNA, 17 nt, Homo sapiens
ccuacccagccucaccu

SEQ ID NO: 778 - RNA, 17 nt, Homo sapiens
ccucaccugcagccuca

SEQ ID NO: 779 - RNA, 17 nt, Homo sapiens
caccugcagccucaccc

SEQ ID NO: 780 - RNA, 17 nt, Homo sapiens
cccccugggccuggcgc

SEQ ID NO: 781 - RNA, 17 nt, Homo sapiens
ugggccuggcgcuggug

SEQ ID NO: 782 - RNA, 17 nt, Homo sapiens
ggccuggcgcuggugcu

SEQ ID NO: 783 - RNA, 17 nt, Homo sapiens
uggcgcuggugcugugg

SEQ ID NO: 784 - RNA, 17 nt, Homo sapiens
gcgcuggugcuguggac

SEQ ID NO: 785 - RNA, 17 nt, Homo sapiens
cuggugcuguggacagu

SEQ ID NO: 786 - RNA, 17 nt, Homo sapiens
uguggacagugcuuggg

SEQ ID NO: 787 - RNA, 17 nt, Homo sapiens
uggacagugcuugggcc

SEQ ID NO: 788 - RNA, 17 nt, Homo sapiens
gugcuugggcccugcug

SEQ ID NO: 789 - RNA, 17 nt, Homo sapiens
ugggcccugcugacccc

SEQ ID NO: 790 - RNA, 17 nt, Homo sapiens
ccccuacgaugaagagg

SEQ ID NO: 791 - RNA, 17 nt, Homo sapiens
augcuacaaugagccca

SEQ ID NO: 792 - RNA, 17 nt, Homo sapiens
ccaaggugacgacaagc

SEQ ID NO: 793 - RNA, 17 nt, Homo sapiens
aggugacgacaagcugc

SEQ ID NO: 794 - RNA, 17 nt, Homo sapiens
gcacggcaaccgcaucu

SEQ ID NO: 795 - RNA, 17 nt, Homo sapiens
cugccgcaaccucacca

SEQ ID NO: 796 - RNA, 17 nt, Homo sapiens
gcacucgaaugugcugg

SEQ ID NO: 797 - RNA, 17 nt, Homo sapiens
uggcccgaauugaugcg

SEQ ID NO: 798 - RNA, 17 nt, Homo sapiens
ccgaauugaugcggcug

SEQ ID NO: 799 - RNA, 17 nt, Homo sapiens
gcagcuggaccucagcg

SEQ ID NO: 800 - RNA, 17 nt, Homo sapiens
ccucagcgauaaugcac

SEQ ID NO: 801 - RNA, 17 nt, Homo sapiens
cagcgauaaugcacagc

SEQ ID NO: 802 - RNA, 17 nt, Homo sapiens
gucuguggacccugcca

SEQ ID NO: 803 - RNA, 17 nt, Homo sapiens
gcaccuggaccgcugcg

SEQ ID NO: 804 - RNA, 17 nt, Homo sapiens
ccugcaggacaacgcgc

SEQ ID NO: 805 - RNA, 17 nt, Homo sapiens
gcaggacaacgcgcugc

SEQ ID NO: 806 - RNA, 17 nt, Homo sapiens
acugccugaugacaccu

SEQ ID NO: 807 - RNA, 17 nt, Homo sapiens
gccugaugacaccuucc

SEQ ID NO: 808 - RNA, 17 nt, Homo sapiens
cuuccgcgaccugggca

SEQ ID NO: 809 - RNA, 17 nt, Homo sapiens
ccugggcaaccucacac

SEQ ID NO: 810 - RNA, 17 nt, Homo sapiens
cagccucgaccgucucc

SEQ ID NO: 811 - RNA, 17 nt, Homo sapiens
gcaccagaaccgcgugg

SEQ ID NO: 812 - RNA, 17 nt, Homo sapiens
cuuccgugaccuuggcc

SEQ ID NO: 813 - RNA, 17 nt, Homo sapiens
gccucaugacacucuau

SEQ ID NO: 814 - RNA, 17 nt, Homo sapiens
guuugccaacaaucuau

SEQ ID NO: 815 - RNA, 17 nt, Homo sapiens
ugccaacaaucuaucag

SEQ ID NO: 816 - RNA, 17 nt, Homo sapiens
gaggcucaacgacaacc

SEQ ID NO: 817 - RNA, 17 nt, Homo sapiens
gcucaacgacaaccccu

SEQ ID NO: 818 - RNA, 17 nt, Homo sapiens
caacgacaaccccuggg

SEQ ID NO: 819 - RNA, 17 nt, Homo sapiens
ggugugugacugccggg

SEQ ID NO: 820 - RNA, 17 nt, Homo sapiens
cucccgcaacgccuggc

SEQ ID NO: 821 - RNA, 17 nt, Homo sapiens
uggccgugaccucaaac

SEQ ID NO: 822 - RNA, 17 nt, Homo sapiens
gaccucaaacgccuagc

SEQ ID NO: 823 - RNA, 17 nt, Homo sapiens
agcugccaaugaccugc

SEQ ID NO: 824 - RNA, 17 nt, Homo sapiens
ugccaaugaccugcagg

SEQ ID NO: 825 - RNA, 17 nt, Homo sapiens
ccaucuggaccggcagg

SEQ ID NO: 826 - RNA, 17 nt, Homo sapiens
ggccaccgaugaggagc

SEQ ID NO: 827 - RNA, 17 nt, Homo sapiens
ccagccagaugccgcug

SEQ ID NO: 828 - RNA, 17 nt, Homo sapiens
ugccgcugacaaggccu

SEQ ID NO: 829 - RNA, 17 nt, Homo sapiens
ccuggaagaccagcuuc

SEQ ID NO: 830 - RNA, 17 nt, Homo sapiens
ggcaggcaaugcgcuga

SEQ ID NO: 831 - RNA, 17 nt, Homo sapiens
cugaagggacgcgugcc

SEQ ID NO: 832 - RNA, 17 nt, Homo sapiens
gcccggugacagcccgc

SEQ ID NO: 833 - RNA, 17 nt, Homo sapiens
gccgggcaacggcucug

SEQ ID NO: 834 - RNA, 17 nt, Homo sapiens
gcacaucaaugacucac

SEQ ID NO: 835 - RNA, 17 nt, Homo sapiens
caucaaugacucacccu

SEQ ID NO: 836 - RNA, 17 nt, Homo sapiens
ccuuugggacucugccu

SEQ ID NO: 837 - RNA, 17 nt, Homo sapiens
acgcaagaaccgcaccc

SEQ ID NO: 838 - RNA, 17 nt, Homo sapiens
guggcgggacuggugac

SEQ ID NO: 839 - RNA, 17 nt, Homo sapiens
gacuggugacucagaag

SEQ ID NO: 840 - RNA, 17 nt, Homo sapiens
ugcuguggacagugcuu

SEQ ID NO: 841 - RNA, 17 nt, Homo sapiens
accccuacgaugaagag

SEQ ID NO: 842 - RNA, 17 nt, Homo sapiens
ccuacgaugaagagggc

SEQ ID NO: 843 - RNA, 17 nt, Homo sapiens
acgaugaagagggcguc

SEQ ID NO: 844 - RNA, 17 nt, Homo sapiens
gaugaagagggcguccg

SEQ ID NO: 845 - RNA, 17 nt, Homo sapiens
augaagagggcguccgc

SEQ ID NO: 846 - RNA, 17 nt, Homo sapiens
cguccgcuggagggagc

SEQ ID NO: 847 - RNA, 17 nt, Homo sapiens
guccgcuggagggagcc

SEQ ID NO: 848 - RNA, 17 nt, Homo sapiens
ccgcuggagggagccgg

SEQ ID NO: 849 - RNA, 17 nt, Homo sapiens
cgcuggagggagccggc

SEQ ID NO: 850 - RNA, 17 nt, Homo sapiens
gcuggagggagccggcu

SEQ ID NO: 851 - RNA, 17 nt, Homo sapiens
agggagccggcugcugg

SEQ ID NO: 852 - RNA, 17 nt, Homo sapiens
cggcugcuggcaugggu

SEQ ID NO: 853 - RNA, 17 nt, Homo sapiens
gcuggcaugggugcugu

SEQ ID NO: 854 - RNA, 17 nt, Homo sapiens
cuggcaugggugcugug

SEQ ID NO: 855 - RNA, 17 nt, Homo sapiens
ggugcuguggcugcagg

SEQ ID NO: 856 - RNA, 17 nt, Homo sapiens
uggcugcaggccuggca

SEQ ID NO: 857 - RNA, 17 nt, Homo sapiens
gcaggccuggcaggugg

SEQ ID NO: 858 - RNA, 17 nt, Homo sapiens
gccuggcagguggcagc

SEQ ID NO: 859 - RNA, 17 nt, Homo sapiens
uggcagguggcagcccc

SEQ ID NO: 860 - RNA, 17 nt, Homo sapiens
caugcccaggugccugc

SEQ ID NO: 861 - RNA, 17 nt, Homo sapiens
gcuacaaugagcccaag

SEQ ID NO: 862 - RNA, 17 nt, Homo sapiens
gagcccaaggugacgac

SEQ ID NO: 863 - RNA, 17 nt, Homo sapiens
cccaaggugacgacaag

SEQ ID NO: 864 - RNA, 17 nt, Homo sapiens
aaggugacgacaagcug

SEQ ID NO: 865 - RNA, 17 nt, Homo sapiens
ccccagcagggccugca

SEQ ID NO: 866 - RNA, 17 nt, Homo sapiens
cccagcagggccugcag

SEQ ID NO: 867 - RNA, 17 nt, Homo sapiens
ggccugcaggcugugcc

SEQ ID NO: 868 - RNA, 17 nt, Homo sapiens
gugcccgugggcauccc

SEQ ID NO: 869 - RNA, 17 nt, Homo sapiens
ugcccgugggcaucccu

SEQ ID NO: 870 - RNA, 17 nt, Homo sapiens
uccugcacggcaaccgc

SEQ ID NO: 871 - RNA, 17 nt, Homo sapiens
cauccuguggcugcacu

SEQ ID NO: 872 - RNA, 17 nt, Homo sapiens
cugcacucgaaugugcu

SEQ ID NO: 873 - RNA, 17 nt, Homo sapiens
aaugugcuggcccgaau

SEQ ID NO: 874 - RNA, 17 nt, Homo sapiens
gcuggcccgaauugaug

SEQ ID NO: 875 - RNA, 17 nt, Homo sapiens
cccgaauugaugcggcu

SEQ ID NO: 876 - RNA, 17 nt, Homo sapiens
auugaugcggcugccuu

SEQ ID NO: 877 - RNA, 17 nt, Homo sapiens
ccuucacuggccuggcc

SEQ ID NO: 878 - RNA, 17 nt, Homo sapiens
acuggccuggcccuccu

SEQ ID NO: 879 - RNA, 17 nt, Homo sapiens
gcccuccuggagcagcu

SEQ ID NO: 880 - RNA, 17 nt, Homo sapiens
cccuccuggagcagcug

SEQ ID NO: 881 - RNA, 17 nt, Homo sapiens
gagcagcuggaccucag

SEQ ID NO: 882 - RNA, 17 nt, Homo sapiens
agcagcuggaccucagc

SEQ ID NO: 883 - RNA, 17 nt, Homo sapiens
accucagcgauaaugca

SEQ ID NO: 884 - RNA, 17 nt, Homo sapiens
acagcuccggucugugg

SEQ ID NO: 885 - RNA, 17 nt, Homo sapiens
cggucuguggacccugc

SEQ ID NO: 886 - RNA, 17 nt, Homo sapiens
ggucuguggacccugcc

SEQ ID NO: 887 - RNA, 17 nt, Homo sapiens
cauuccacggccugggc

SEQ ID NO: 888 - RNA, 17 nt, Homo sapiens
cacggccugggccgccu

SEQ ID NO: 889 - RNA, 17 nt, Homo sapiens
acggccugggccgccua

SEQ ID NO: 890 - RNA, 17 nt, Homo sapiens
cugcaccuggaccgcug

SEQ ID NO: 891 - RNA, 17 nt, Homo sapiens
ugcaccuggaccgcugc

SEQ ID NO: 892 - RNA, 17 nt, Homo sapiens
accgcugcggccugcag

SEQ ID NO: 893 - RNA, 17 nt, Homo sapiens
ggccugcaggagcuggg

SEQ ID NO: 894 - RNA, 17 nt, Homo sapiens
gccugcaggagcugggc

SEQ ID NO: 895 - RNA, 17 nt, Homo sapiens
caggagcugggcccggg

SEQ ID NO: 896 - RNA, 17 nt, Homo sapiens
aggagcugggcccgggg

SEQ ID NO: 897 - RNA, 17 nt, Homo sapiens
cugggcccggggcuguu

SEQ ID NO: 898 - RNA, 17 nt, Homo sapiens
ugggcccggggcuguuc

SEQ ID NO: 899 - RNA, 17 nt, Homo sapiens
gggcccggggcuguucc

SEQ ID NO: 900 - RNA, 17 nt, Homo sapiens
uguuccgcggccuggcu

SEQ ID NO: 901 - RNA, 17 nt, Homo sapiens
cgcggccuggcugcccu

SEQ ID NO: 902 - RNA, 17 nt, Homo sapiens
uaccugcaggacaacgc

SEQ ID NO: 903 - RNA, 17 nt, Homo sapiens
accugcaggacaacgcg

SEQ ID NO: 904 - RNA, 17 nt, Homo sapiens
gcgcugcaggcacugcc

SEQ ID NO: 905 - RNA, 17 nt, Homo sapiens
cacugccugaugacacc

SEQ ID NO: 906 - RNA, 17 nt, Homo sapiens
ugccugaugacaccuuc

SEQ ID NO: 907 - RNA, 17 nt, Homo sapiens
ccuuccgcgaccugggc

SEQ ID NO: 908 - RNA, 17 nt, Homo sapiens
cgcgaccugggcaaccu

SEQ ID NO: 909 - RNA, 17 nt, Homo sapiens
gcgaccugggcaaccuc

SEQ ID NO: 910 - RNA, 17 nt, Homo sapiens
gcgugcccgagcgcgcc

SEQ ID NO: 911 - RNA, 17 nt, Homo sapiens
ccuuccgugggcugcac

SEQ ID NO: 912 - RNA, 17 nt, Homo sapiens
cuuccgugggcugcaca

SEQ ID NO: 913 - RNA, 17 nt, Homo sapiens
acagccucgaccgucuc

SEQ ID NO: 914 - RNA, 17 nt, Homo sapiens
cugcaccagaaccgcgu

SEQ ID NO: 915 - RNA, 17 nt, Homo sapiens
aaccgcguggcccaugu

SEQ ID NO: 916 - RNA, 17 nt, Homo sapiens
ccuuccgugaccuuggc

SEQ ID NO: 917 - RNA, 17 nt, Homo sapiens
gugaccuuggccgccuc

SEQ ID NO: 918 - RNA, 17 nt, Homo sapiens
cgccucaugacacucua

SEQ ID NO: 919 - RNA, 17 nt, Homo sapiens
ugcccacugaggcccug

SEQ ID NO: 920 - RNA, 17 nt, Homo sapiens
cccacugaggcccuggc

SEQ ID NO: 921 - RNA, 17 nt, Homo sapiens
gaggcccuggccccccu

SEQ ID NO: 922 - RNA, 17 nt, Homo sapiens
caguaccugaggcucaa

SEQ ID NO: 923 - RNA, 17 nt, Homo sapiens
guaccugaggcucaacg

SEQ ID NO: 924 - RNA, 17 nt, Homo sapiens
ggcucaacgacaacccc

SEQ ID NO: 925 - RNA, 17 nt, Homo sapiens
caaccccugggugugug

SEQ ID NO: 926 - RNA, 17 nt, Homo sapiens
aaccccuggguguguga

SEQ ID NO: 927 - RNA, 17 nt, Homo sapiens
gggugugugacugccgg

SEQ ID NO: 928 - RNA, 17 nt, Homo sapiens
ugacugccgggcacgcc

SEQ ID NO: 929 - RNA, 17 nt, Homo sapiens
gacugccgggcacgccc

SEQ ID NO: 930 - RNA, 17 nt, Homo sapiens
cccacucugggccuggc

SEQ ID NO: 931 - RNA, 17 nt, Homo sapiens
ccacucugggccuggcu

SEQ ID NO: 932 - RNA, 17 nt, Homo sapiens
cugggccuggcugcaga

SEQ ID NO: 933 - RNA, 17 nt, Homo sapiens
uggcugcagaaguuccg

SEQ ID NO: 934 - RNA, 17 nt, Homo sapiens
aguuccgcggcuccucc

SEQ ID NO: 935 - RNA, 17 nt, Homo sapiens
ccuccuccgaggugccc

SEQ ID NO: 936 - RNA, 17 nt, Homo sapiens
uccuccgaggugcccug

SEQ ID NO: 937 - RNA, 17 nt, Homo sapiens
caacgccuggcuggccg

SEQ ID NO: 938 - RNA, 17 nt, Homo sapiens
gccuggcuggccgugac

SEQ ID NO: 939 - RNA, 17 nt, Homo sapiens
cuggccgugaccucaaa

SEQ ID NO: 940 - RNA, 17 nt, Homo sapiens
cugccaaugaccugcag

SEQ ID NO: 941 - RNA, 17 nt, Homo sapiens
gaccugcagggcugcgc

SEQ ID NO: 942 - RNA, 17 nt, Homo sapiens
accugcagggcugcgcu

SEQ ID NO: 943 - RNA, 17 nt, Homo sapiens
ugcgcuguggccaccgg

SEQ ID NO: 944 - RNA, 17 nt, Homo sapiens
uggccaccggcccuuac

SEQ ID NO: 945 - RNA, 17 nt, Homo sapiens
ucccaucuggaccggca

SEQ ID NO: 946 - RNA, 17 nt, Homo sapiens
cccaucuggaccggcag

SEQ ID NO: 947 - RNA, 17 nt, Homo sapiens
ucuggaccggcagggcc

SEQ ID NO: 948 - RNA, 17 nt, Homo sapiens
gaccggcagggccaccg

SEQ ID NO: 949 - RNA, 17 nt, Homo sapiens
accggcagggccaccga

SEQ ID NO: 950 - RNA, 17 nt, Homo sapiens
gggccaccgaugaggag

SEQ ID NO: 951 - RNA, 17 nt, Homo sapiens
ccaccgaugaggagccg

SEQ ID NO: 952 - RNA, 17 nt, Homo sapiens
accgaugaggagccgcu

SEQ ID NO: 953 - RNA, 17 nt, Homo sapiens
ccgaugaggagccgcug

SEQ ID NO: 954 - RNA, 17 nt, Homo sapiens
gagccgcuggggcuucc

SEQ ID NO: 955 - RNA, 17 nt, Homo sapiens
agccgcuggggcuuccc

SEQ ID NO: 956 - RNA, 17 nt, Homo sapiens
gccgcuggggcuuccca

SEQ ID NO: 957 - RNA, 17 nt, Homo sapiens
gccagccagaugccgcu

SEQ ID NO: 958 - RNA, 17 nt, Homo sapiens
augccgcugacaaggcc

SEQ ID NO: 959 - RNA, 17 nt, Homo sapiens
gcugacaaggccucagu

SEQ ID NO: 960 - RNA, 17 nt, Homo sapiens
ucaguacuggagccugg

SEQ ID NO: 961 - RNA, 17 nt, Homo sapiens
caguacuggagccugga

SEQ ID NO: 962 - RNA, 17 nt, Homo sapiens
uggagccuggaagacca

SEQ ID NO: 963 - RNA, 17 nt, Homo sapiens
ggagccuggaagaccag

SEQ ID NO: 964 - RNA, 17 nt, Homo sapiens
gccuggaagaccagcuu

SEQ ID NO: 965 - RNA, 17 nt, Homo sapiens
ccagcuucggcaggcaa

SEQ ID NO: 966 - RNA, 17 nt, Homo sapiens
cuucggcaggcaaugcg

SEQ ID NO: 967 - RNA, 17 nt, Homo sapiens
aaugcgcugaagggacg

SEQ ID NO: 968 - RNA, 17 nt, Homo sapiens
gcgcugaagggacgcgu

SEQ ID NO: 969 - RNA, 17 nt, Homo sapiens
cgcugaagggacgcgug

SEQ ID NO: 970 - RNA, 17 nt, Homo sapiens
gcugaagggacgcgugc

SEQ ID NO: 971 - RNA, 17 nt, Homo sapiens
ugccgcccggugacagc

SEQ ID NO: 972 - RNA, 17 nt, Homo sapiens
cgcccggugacagcccg

SEQ ID NO: 973 - RNA, 17 nt, Homo sapiens
agcccgccgggcaacgg

SEQ ID NO: 974 - RNA, 17 nt, Homo sapiens
gcccgccgggcaacggc

SEQ ID NO: 975 - RNA, 17 nt, Homo sapiens
cgggcaacggcucuggc

SEQ ID NO: 976 - RNA, 17 nt, Homo sapiens
acggcucuggcccacgg

SEQ ID NO: 977 - RNA, 17 nt, Homo sapiens
uggcccacggcacauca

SEQ ID NO: 978 - RNA, 17 nt, Homo sapiens
acaucaaugacucaccc

SEQ ID NO: 979 - RNA, 17 nt, Homo sapiens
cacccuuugggacucug

SEQ ID NO: 980 - RNA, 17 nt, Homo sapiens
acccuuugggacucugc

SEQ ID NO: 981 - RNA, 17 nt, Homo sapiens
cccuuugggacucugcc

SEQ ID NO: 982 - RNA, 17 nt, Homo sapiens
cucugccuggcucugcu

SEQ ID NO: 983 - RNA, 17 nt, Homo sapiens
gcucugcugagcccccg

SEQ ID NO: 984 - RNA, 17 nt, Homo sapiens
ugcagugcggcccgagg

SEQ ID NO: 985 - RNA, 17 nt, Homo sapiens
ugcggcccgagggcucc

SEQ ID NO: 986 - RNA, 17 nt, Homo sapiens
cggcccgagggcuccga

SEQ ID NO: 987 - RNA, 17 nt, Homo sapiens
ggcccgagggcuccgag

SEQ ID NO: 988 - RNA, 17 nt, Homo sapiens
agggcuccgagccacca

SEQ ID NO: 989 - RNA, 17 nt, Homo sapiens
agccaccaggguucccc

SEQ ID NO: 990 - RNA, 17 nt, Homo sapiens
gccaccaggguucccca

SEQ ID NO: 991 - RNA, 17 nt, Homo sapiens
cccaccucgggcccucg

SEQ ID NO: 992 - RNA, 17 nt, Homo sapiens
ccaccucgggcccucgc

SEQ ID NO: 993 - RNA, 17 nt, Homo sapiens
cccucgccggaggccag

SEQ ID NO: 994 - RNA, 17 nt, Homo sapiens
ccucgccggaggccagg

SEQ ID NO: 995 - RNA, 17 nt, Homo sapiens
ucgccggaggccaggcu

SEQ ID NO: 996 - RNA, 17 nt, Homo sapiens
ggaggccaggcuguuca

SEQ ID NO: 997 - RNA, 17 nt, Homo sapiens
ucacgcaagaaccgcac

SEQ ID NO: 998 - RNA, 17 nt, Homo sapiens
ugccgucugggccaggc

SEQ ID NO: 999 - RNA, 17 nt, Homo sapiens
gccgucugggccaggca

SEQ ID NO: 1000 - RNA, 17 nt, Homo sapiens
cugggccaggcaggcag

SEQ ID NO: 1001 - RNA, 17 nt, Homo sapiens
gccaggcaggcagcggg

SEQ ID NO: 1002 - RNA, 17 nt, Homo sapiens
caggcagcggggguggc

SEQ ID NO: 1003 - RNA, 17 nt, Homo sapiens
aggcagcggggguggcg

SEQ ID NO: 1004 - RNA, 17 nt, Homo sapiens
ggcagcggggguggcgg

SEQ ID NO: 1005 - RNA, 17 nt, Homo sapiens
gcagcggggguggcggg

SEQ ID NO: 1006 - RNA, 17 nt, Homo sapiens
gcggggguggcgggacu

SEQ ID NO: 1007 - RNA, 17 nt, Homo sapiens
gggguggcgggacuggu

SEQ ID NO: 1008 - RNA, 17 nt, Homo sapiens
ggguggcgggacuggug

SEQ ID NO: 1009 - RNA, 17 nt, Homo sapiens
gguggcgggacugguga

SEQ ID NO: 1010 - RNA, 17 nt, Homo sapiens
gcgggacuggugacuca

SEQ ID NO: 1011 - RNA, 17 nt, Homo sapiens
ggacuggugacucagaa

SEQ ID NO: 1012 - RNA, 17 nt, Homo sapiens
gugacucagaaggcuca

SEQ ID NO: 1013 - RNA, 17 nt, Homo sapiens
acucagaaggcucaggu

SEQ ID NO: 1014 - RNA, 17 nt, Homo sapiens
aaggcucaggugcccua

SEQ ID NO: 1015 - RNA, 17 nt, Homo sapiens
accccccugggccuggc

SEQ ID NO: 1016 - RNA, 17 nt, Homo sapiens
ccccccugggccuggcg

SEQ ID NO: 1017 - RNA, 17 nt, Homo sapiens
cugggccuggcgcuggu

SEQ ID NO: 1018 - RNA, 17 nt, Homo sapiens
cuggcgcuggugcugug

SEQ ID NO: 1019 - RNA, 17 nt, Homo sapiens
ggugcuguggacagugc

SEQ ID NO: 1020 - RNA, 17 nt, Homo sapiens
gugcuguggacagugcu

SEQ ID NO: 1021 - RNA, 17 nt, Homo sapiens
cagugcuugggcccugc

SEQ ID NO: 1022 - RNA, 17 nt, Homo sapiens
agugcuugggcccugcu

SEQ ID NO: 1023 - RNA, 17 nt, Homo sapiens
gcccugcugacccccag

SEQ ID NO: 1024 - RNA, 38 nt, Artificial Sequence
  Definition of Artificial Sequence:  Enzymatic Nucleic Acid
cuucaucgcugaugaggccguuaggccgaaagggguug

SEQ ID NO: 1025 - RNA, 38 nt, Artificial Sequence
  Definition of Artificial Sequence:  Enzymatic Nucleic Acid
cuccagcgcugaugaggccguuaggccgaaacgcccuc

SEQ ID NO: 1026 - RNA, 38 nt, Artificial Sequence
  Definition of Artificial Sequence:  Enzymatic Nucleic Acid
uuguagcacugaugaggccguuaggccgaaacgcaggc

SEQ ID NO: 1027 - RNA, 38 nt, Artificial Sequence
  Definition of Artificial Sequence:  Enzymatic Nucleic Acid
gcucauugcugaugaggccguuaggccgaaagcauacg

SEQ ID NO: 1028 - RNA, 38 nt, Artificial Sequence
  Definition of Artificial Sequence:  Enzymatic Nucleic Acid
gcagcaggcugaugaggccguuaggccgaaaugcccac

SEQ ID NO: 1029 - RNA, 38 nt, Artificial Sequence
  Definition of Artificial Sequence:  Enzymatic Nucleic Acid
ugcaggaacugaugaggccguuaggccgaaaugcgcug

SEQ ID NO: 1030 - RNA, 38 nt, Artificial Sequence
  Definition of Artificial Sequence:  Enzymatic Nucleic Acid
cgugcaggcugaugaggccguuaggccgaaagaugcgc

SEQ ID NO: 1031 - RNA, 38 nt, Artificial Sequence
  Definition of Artificial Sequence:  Enzymatic Nucleic Acid
ccgugcagcugaugaggccguuaggccgaaaagaugcg

SEQ ID NO: 1032 - RNA, 38 nt, Artificial Sequence
  Definition of Artificial Sequence:  Enzymatic Nucleic Acid
acaugcgacugaugaggccguuaggccgaaaugcgguu

SEQ ID NO: 1033 - RNA, 38 nt, Artificial Sequence
  Definition of Artificial Sequence:  Enzymatic Nucleic Acid
gcacaugccugaugaggccguuaggccgaaagaugcgg

SEQ ID NO: 1034 - RNA, 38 nt, Artificial Sequence
  Definition of Artificial Sequence:  Enzymatic Nucleic Acid
aggcacggcugaugaggccguuaggccgaaagcuggca

SEQ ID NO: 1035 - RNA, 38 nt, Artificial Sequence
  Definition of Artificial Sequence:  Enzymatic Nucleic Acid
caggcacgcugaugaggccguuaggccgaaaagcuggc

SEQ ID NO: 1036 - RNA, 38 nt, Artificial Sequence
  Definition of Artificial Sequence:  Enzymatic Nucleic Acid
aggauggucugaugaggccguuaggccgaaagguugcg

SEQ ID NO: 1037 - RNA, 38 nt, Artificial Sequence
  Definition of Artificial Sequence:  Enzymatic Nucleic Acid
agccacagcugaugaggccguuaggccgaaauggugag

SEQ ID NO: 1038 - RNA, 38 nt, Artificial Sequence
  Definition of Artificial Sequence:  Enzymatic Nucleic Acid
gcacauuccugaugaggccguuaggccgaaagugcagc

SEQ ID NO: 1039 - RNA, 38 nt, Artificial Sequence
  Definition of Artificial Sequence:  Enzymatic Nucleic Acid
gccgcauccugaugaggccguuaggccgaaauucgggc

SEQ ID NO: 1040 - RNA, 38 nt, Artificial Sequence
  Definition of Artificial Sequence:  Enzymatic Nucleic Acid
ggccagugcugaugaggccguuaggccgaaaggcagcc

SEQ ID NO: 1041 - RNA, 38 nt, Artificial Sequence
  Definition of Artificial Sequence:  Enzymatic Nucleic Acid
aggccagucugaugaggccguuaggccgaaaaggcagc

SEQ ID NO: 1042 - RNA, 38 nt, Artificial Sequence
  Definition of Artificial Sequence:  Enzymatic Nucleic Acid
ugcuccagcugaugaggccguuaggccgaaagggccag

SEQ ID NO: 1043 - RNA, 38 nt, Artificial Sequence
  Definition of Artificial Sequence:  Enzymatic Nucleic Acid
uuaucgcucugaugaggccguuaggccgaaagguccag

SEQ ID NO: 1044 - RNA, 38 nt, Artificial Sequence
  Definition of Artificial Sequence:  Enzymatic Nucleic Acid
cugugcaucugaugaggccguuaggccgaaaucgcuga

SEQ ID NO: 1045 - RNA, 38 nt, Artificial Sequence
  Definition of Artificial Sequence:  Enzymatic Nucleic Acid
acagaccgcugaugaggccguuaggccgaaagcugugc

SEQ ID NO: 1046 - RNA, 38 nt, Artificial Sequence
  Definition of Artificial Sequence:  Enzymatic Nucleic Acid
gguccacacugaugaggccguuaggccgaaaccggagc

SEQ ID NO: 1047 - RNA, 38 nt, Artificial Sequence
  Definition of Artificial Sequence:  Enzymatic Nucleic Acid
ggccguggcugaugaggccguuaggccgaaauguggca

SEQ ID NO: 1048 - RNA, 38 nt, Artificial Sequence
  Definition of Artificial Sequence:  Enzymatic Nucleic Acid
aggccgugcugaugaggccguuaggccgaaaauguggc

SEQ ID NO: 1049 - RNA, 38 nt, Artificial Sequence
  Definition of Artificial Sequence:  Enzymatic Nucleic Acid
agcgugugcugaugaggccguuaggccgaaaggcggcc

SEQ ID NO: 1050 - RNA, 38 nt, Artificial Sequence
  Definition of Artificial Sequence:  Enzymatic Nucleic Acid
ggccgcggcugaugaggccguuaggccgaaacagcccc

SEQ ID NO: 1051 - RNA, 38 nt, Artificial Sequence
  Definition of Artificial Sequence:  Enzymatic Nucleic Acid
aggccgcgcugaugaggccguuaggccgaaaacagccc

SEQ ID NO: 1052 - RNA, 38 nt, Artificial Sequence
  Definition of Artificial Sequence:  Enzymatic Nucleic Acid
gguagaggcugaugaggccguuaggccgaaacugcagg

SEQ ID NO: 1053 - RNA, 38 nt, Artificial Sequence
  Definition of Artificial Sequence:  Enzymatic Nucleic Acid
ugcagguacugaugaggccguuaggccgaaagguacug

SEQ ID NO: 1054 - RNA, 38 nt, Artificial Sequence
  Definition of Artificial Sequence:  Enzymatic Nucleic Acid
ccugcaggcugaugaggccguuaggccgaaagagguac

SEQ ID NO: 1055 - RNA, 38 nt, Artificial Sequence
  Definition of Artificial Sequence:  Enzymatic Nucleic Acid
ggucgcggcugaugaggccguuaggccgaaagguguca

SEQ ID NO: 1056 - RNA, 38 nt, Artificial Sequence
  Definition of Artificial Sequence:  Enzymatic Nucleic Acid
aggucgcgcugaugaggccguuaggccgaaaagguguc

SEQ ID NO: 1057 - RNA, 38 nt, Artificial Sequence
  Definition of Artificial Sequence:  Enzymatic Nucleic Acid
aggugugucugaugaggccguuaggccgaaagguugcc

SEQ ID NO: 1058 - RNA, 38 nt, Artificial Sequence
  Definition of Artificial Sequence:  Enzymatic Nucleic Acid
ugcaggaacugaugaggccguuaggccgaaaggugugu

SEQ ID NO: 1059 - RNA, 38 nt, Artificial Sequence
  Definition of Artificial Sequence:  Enzymatic Nucleic Acid
cgugcaggcugaugaggccguuaggccgaaagaggugu

SEQ ID NO: 1060 - RNA, 38 nt, Artificial Sequence
  Definition of Artificial Sequence:  Enzymatic Nucleic Acid
ccgugcagcugaugaggccguuaggccgaaaagaggug

SEQ ID NO: 1061 - RNA, 38 nt, Artificial Sequence
  Definition of Artificial Sequence:  Enzymatic Nucleic Acid
acgcuggacugaugaggccguuaggccgaaaugcgguu

SEQ ID NO: 1062 - RNA, 38 nt, Artificial Sequence
  Definition of Artificial Sequence:  Enzymatic Nucleic Acid
gcacgcugcugaugaggccguuaggccgaaagaugcgg

SEQ ID NO: 1063 - RNA, 38 nt, Artificial Sequence
  Definition of Artificial Sequence:  Enzymatic Nucleic Acid
gcccacggcugaugaggccguuaggccgaaaggcgcgc

SEQ ID NO: 1064 - RNA, 38 nt, Artificial Sequence
  Definition of Artificial Sequence:  Enzymatic Nucleic Acid
agcccacgcugaugaggccguuaggccgaaaaggcgcg

SEQ ID NO: 1065 - RNA, 38 nt, Artificial Sequence
  Definition of Artificial Sequence:  Enzymatic Nucleic Acid
agacgguccugaugaggccguuaggccgaaaggcugug

SEQ ID NO: 1066 - RNA, 38 nt, Artificial Sequence
  Definition of Artificial Sequence:  Enzymatic Nucleic Acid
caguaggacugaugaggccguuaggccgaaacggucga

SEQ ID NO: 1067 - RNA, 38 nt, Artificial Sequence
  Definition of Artificial Sequence:  Enzymatic Nucleic Acid
ugcaguagcugaugaggccguuaggccgaaagacgguc

SEQ ID NO: 1068 - RNA, 38 nt, Artificial Sequence
  Definition of Artificial Sequence:  Enzymatic Nucleic Acid
uggugcagcugaugaggccguuaggccgaaaggagacg

SEQ ID NO: 1069 - RNA, 38 nt, Artificial Sequence
  Definition of Artificial Sequence:  Enzymatic Nucleic Acid
ggucacggcugaugaggccguuaggccgaaaggcaugc

SEQ ID NO: 1070 - RNA, 38 nt, Artificial Sequence
  Definition of Artificial Sequence:  Enzymatic Nucleic Acid
aggucacgcugaugaggccguuaggccgaaaaggcaug

SEQ ID NO: 1071 - RNA, 38 nt, Artificial Sequence
  Definition of Artificial Sequence:  Enzymatic Nucleic Acid
aggcggcccugaugaggccguuaggccgaaaggucacg

SEQ ID NO: 1072 - RNA, 38 nt, Artificial Sequence
  Definition of Artificial Sequence:  Enzymatic Nucleic Acid
agugucaucugaugaggccguuaggccgaaaggcggcc

SEQ ID NO: 1073 - RNA, 38 nt, Artificial Sequence
  Definition of Artificial Sequence:  Enzymatic Nucleic Acid
aacagauacugaugaggccguuaggccgaaagugucau

SEQ ID NO: 1074 - RNA, 38 nt, Artificial Sequence
  Definition of Artificial Sequence:  Enzymatic Nucleic Acid
caaacagacugaugaggccguuaggccgaaagaguguc

SEQ ID NO: 1075 - RNA, 38 nt, Artificial Sequence
  Definition of Artificial Sequence:  Enzymatic Nucleic Acid
ggcaaacacugaugaggccguuaggccgaaauagagug

SEQ ID NO: 1076 - RNA, 38 nt, Artificial Sequence
  Definition of Artificial Sequence:  Enzymatic Nucleic Acid
uguuggcacugaugaggccguuaggccgaaacagauag

SEQ ID NO: 1077 - RNA, 38 nt, Artificial Sequence
  Definition of Artificial Sequence:  Enzymatic Nucleic Acid
uuguuggccugaugaggccguuaggccgaaaacagaua

SEQ ID NO: 1078 - RNA, 38 nt, Artificial Sequence
  Definition of Artificial Sequence:  Enzymatic Nucleic Acid
cgcugauacugaugaggccguuaggccgaaauuguugg

SEQ ID NO: 1079 - RNA, 38 nt, Artificial Sequence
  Definition of Artificial Sequence:  Enzymatic Nucleic Acid
agcgcugacugaugaggccguuaggccgaaagauuguu

SEQ ID NO: 1080 - RNA, 38 nt, Artificial Sequence
  Definition of Artificial Sequence:  Enzymatic Nucleic Acid
gcagcgcucugaugaggccguuaggccgaaauagauug

SEQ ID NO: 1081 - RNA, 38 nt, Artificial Sequence
  Definition of Artificial Sequence:  Enzymatic Nucleic Acid
gccucaggcugaugaggccguuaggccgaaacugcagg

SEQ ID NO: 1082 - RNA, 38 nt, Artificial Sequence
  Definition of Artificial Sequence:  Enzymatic Nucleic Acid
uugucguucugaugaggccguuaggccgaaagccucag

SEQ ID NO: 1083 - RNA, 38 nt, Artificial Sequence
  Definition of Artificial Sequence:  Enzymatic Nucleic Acid
caggcccacugaugaggccguuaggccgaaagugggcg

SEQ ID NO: 1084 - RNA, 38 nt, Artificial Sequence
  Definition of Artificial Sequence:  Enzymatic Nucleic Acid
agccgcggcugaugaggccguuaggccgaaacuucugc

SEQ ID NO: 1085 - RNA, 38 nt, Artificial Sequence
  Definition of Artificial Sequence:  Enzymatic Nucleic Acid
gagccgcgcugaugaggccguuaggccgaaaacuucug

SEQ ID NO: 1086 - RNA, 38 nt, Artificial Sequence
  Definition of Artificial Sequence:  Enzymatic Nucleic Acid
cggaggagcugaugaggccguuaggccgaaagccgcgg

SEQ ID NO: 1087 - RNA, 38 nt, Artificial Sequence
  Definition of Artificial Sequence:  Enzymatic Nucleic Acid
ccucggagcugaugaggccguuaggccgaaaggagccg

SEQ ID NO: 1088 - RNA, 38 nt, Artificial Sequence
  Definition of Artificial Sequence:  Enzymatic Nucleic Acid
gcaccucgcugaugaggccguuaggccgaaaggaggag

SEQ ID NO: 1089 - RNA, 38 nt, Artificial Sequence
  Definition of Artificial Sequence:  Enzymatic Nucleic Acid
cguugcggcugaugaggccguuaggccgaaaggcugca

SEQ ID NO: 1090 - RNA, 38 nt, Artificial Sequence
  Definition of Artificial Sequence:  Enzymatic Nucleic Acid
aggcguuucugaugaggccguuaggccgaaaggucacg

SEQ ID NO: 1091 - RNA, 38 nt, Artificial Sequence
  Definition of Artificial Sequence:  Enzymatic Nucleic Acid
uuggcagccugaugaggccguuaggccgaaaggcguuu

SEQ ID NO: 1092 - RNA, 38 nt, Artificial Sequence
  Definition of Artificial Sequence:  Enzymatic Nucleic Acid
gggauggucugaugaggccguuaggccgaaagggccgg

SEQ ID NO: 1093 - RNA, 38 nt, Artificial Sequence
  Definition of Artificial Sequence:  Enzymatic Nucleic Acid
ugggauggcugaugaggccguuaggccgaaaagggccg

SEQ ID NO: 1094 - RNA, 38 nt, Artificial Sequence
  Definition of Artificial Sequence:  Enzymatic Nucleic Acid
ccagauggcugaugaggccguuaggccgaaaugguaag

SEQ ID NO: 1095 - RNA, 38 nt, Artificial Sequence
  Definition of Artificial Sequence:  Enzymatic Nucleic Acid
ccgguccacugaugaggccguuaggccgaaaugggaug

SEQ ID NO: 1096 - RNA, 38 nt, Artificial Sequence
  Definition of Artificial Sequence:  Enzymatic Nucleic Acid
cacuugggcugaugaggccguuaggccgaaagccccag

SEQ ID NO: 1097 - RNA, 38 nt, Artificial Sequence
  Definition of Artificial Sequence:  Enzymatic Nucleic Acid
gcacuuggcugaugaggccguuaggccgaaaagcccca

SEQ ID NO: 1098 - RNA, 38 nt, Artificial Sequence
  Definition of Artificial Sequence:  Enzymatic Nucleic Acid
ccaguacucugaugaggccguuaggccgaaaggccuug

SEQ ID NO: 1099 - RNA, 38 nt, Artificial Sequence
  Definition of Artificial Sequence:  Enzymatic Nucleic Acid
ggcuccagcugaugaggccguuaggccgaaacugaggc

SEQ ID NO: 1100 - RNA, 38 nt, Artificial Sequence
  Definition of Artificial Sequence:  Enzymatic Nucleic Acid
gccugccgcugaugaggccguuaggccgaaagcugguc

SEQ ID NO: 1101 - RNA, 38 nt, Artificial Sequence
  Definition of Artificial Sequence:  Enzymatic Nucleic Acid
ugccugcccugaugaggccguuaggccgaaaagcuggu

SEQ ID NO: 1102 - RNA, 38 nt, Artificial Sequence
  Definition of Artificial Sequence:  Enzymatic Nucleic Acid
gugggccacugaugaggccguuaggccgaaagccguug

SEQ ID NO: 1103 - RNA, 38 nt, Artificial Sequence
  Definition of Artificial Sequence:  Enzymatic Nucleic Acid
gagucauucugaugaggccguuaggccgaaaugugccg

SEQ ID NO: 1104 - RNA, 38 nt, Artificial Sequence
  Definition of Artificial Sequence:  Enzymatic Nucleic Acid
caaagggucugaugaggccguuaggccgaaagucauug

SEQ ID NO: 1105 - RNA, 38 nt, Artificial Sequence
  Definition of Artificial Sequence:  Enzymatic Nucleic Acid
gagucccacugaugaggccguuaggccgaaagggugag

SEQ ID NO: 1106 - RNA, 38 nt, Artificial Sequence
  Definition of Artificial Sequence:  Enzymatic Nucleic Acid
agaguccccugaugaggccguuaggccgaaaaggguga

SEQ ID NO: 1107 - RNA, 38 nt, Artificial Sequence
  Definition of Artificial Sequence:  Enzymatic Nucleic Acid
gccaggcacugaugaggccguuaggccgaaagucccaa

SEQ ID NO: 1108 - RNA, 38 nt, Artificial Sequence
  Definition of Artificial Sequence:  Enzymatic Nucleic Acid
gcucagcacugaugaggccguuaggccgaaagccaggc

SEQ ID NO: 1109 - RNA, 38 nt, Artificial Sequence
  Definition of Artificial Sequence:  Enzymatic Nucleic Acid
acugcagucugaugaggccguuaggccgaaagcggggg

SEQ ID NO: 1110 - RNA, 38 nt, Artificial Sequence
  Definition of Artificial Sequence:  Enzymatic Nucleic Acid
guggcucgcugaugaggccguuaggccgaaagcccucg

SEQ ID NO: 1111 - RNA, 38 nt, Artificial Sequence
  Definition of Artificial Sequence:  Enzymatic Nucleic Acid
agguggggcugaugaggccguuaggccgaaacccuggu

SEQ ID NO: 1112 - RNA, 38 nt, Artificial Sequence
  Definition of Artificial Sequence:  Enzymatic Nucleic Acid
gaggugggcugaugaggccguuaggccgaaaacccugg

SEQ ID NO: 1113 - RNA, 38 nt, Artificial Sequence
  Definition of Artificial Sequence:  Enzymatic Nucleic Acid
gagggccccugaugaggccguuaggccgaaaggugggg

SEQ ID NO: 1114 - RNA, 38 nt, Artificial Sequence
  Definition of Artificial Sequence:  Enzymatic Nucleic Acid
ccuccggccugaugaggccguuaggccgaaagggcccg

SEQ ID NO: 1115 - RNA, 38 nt, Artificial Sequence
  Definition of Artificial Sequence:  Enzymatic Nucleic Acid
cuugcgugcugaugaggccguuaggccgaaacagccug

SEQ ID NO: 1116 - RNA, 38 nt, Artificial Sequence
  Definition of Artificial Sequence:  Enzymatic Nucleic Acid
ucuugcgucugaugaggccguuaggccgaaaacagccu

SEQ ID NO: 1117 - RNA, 38 nt, Artificial Sequence
  Definition of Artificial Sequence:  Enzymatic Nucleic Acid
cuggcccacugaugaggccguuaggccgaaacggcagu

SEQ ID NO: 1118 - RNA, 38 nt, Artificial Sequence
  Definition of Artificial Sequence:  Enzymatic Nucleic Acid
agccuucucugaugaggccguuaggccgaaagucacca

SEQ ID NO: 1119 - RNA, 38 nt, Artificial Sequence
  Definition of Artificial Sequence:  Enzymatic Nucleic Acid
gggcaccucugaugaggccguuaggccgaaagccuucu

SEQ ID NO: 1120 - RNA, 38 nt, Artificial Sequence
  Definition of Artificial Sequence:  Enzymatic Nucleic Acid
aggcugggcugaugaggccguuaggccgaaagggcacc

SEQ ID NO: 1121 - RNA, 38 nt, Artificial Sequence
  Definition of Artificial Sequence:  Enzymatic Nucleic Acid
cugcaggucugaugaggccguuaggccgaaaggcuggg

SEQ ID NO: 1122 - RNA, 38 nt, Artificial Sequence
  Definition of Artificial Sequence:  Enzymatic Nucleic Acid
aggggggucugaugaggccguuaggccgaaaggcugca

SEQ ID NO: 1123 - RNA, 38 nt, Artificial Sequence
  Definition of Artificial Sequence:  Enzymatic Nucleic Acid
cagggccccugaugaggccguuaggccgaaagcacugu

SEQ ID NO: 1124 - RNA, 38 nt, Artificial Sequence
  Definition of Artificial Sequence:  Enzymatic Nucleic Acid
  misc_feature (31)..(31): n stands for Inosine
uucaucgucugaugaggccguuaggccgaanggguugg

SEQ ID NO: 1125 - RNA, 38 nt, Artificial Sequence
  Definition of Artificial Sequence:  Enzymatic Nucleic Acid
  misc_feature (31)..(31): n stands for Inosine
ccuccagccugaugaggccguuaggccgaanacgcccu

SEQ ID NO: 1126 - RNA, 38 nt, Artificial Sequence
  Definition of Artificial Sequence:  Enzymatic Nucleic Acid
  misc_feature (31)..(31): n stands for Inosine
cucccucccugaugaggccguuaggccgaancggacgc

SEQ ID NO: 1127 - RNA, 38 nt, Artificial Sequence
  Definition of Artificial Sequence:  Enzymatic Nucleic Acid
  misc_feature (31)..(31): n stands for Inosine
cagcagcccugaugaggccguuaggccgaancucccuc

SEQ ID NO: 1128 - RNA, 38 nt, Artificial Sequence
  Definition of Artificial Sequence:  Enzymatic Nucleic Acid
  misc_feature (31)..(31): n stands for Inosine
augccagccugaugaggccguuaggccgaanccggcuc

SEQ ID NO: 1129 - RNA, 38 nt, Artificial Sequence
  Definition of Artificial Sequence:  Enzymatic Nucleic Acid
  misc_feature (31)..(31): n stands for Inosine
cccaugcccugaugaggccguuaggccgaancagccgg

SEQ ID NO: 1130 - RNA, 38 nt, Artificial Sequence
  Definition of Artificial Sequence:  Enzymatic Nucleic Acid
  misc_feature (31)..(31): n stands for Inosine
agcacccacugaugaggccguuaggccgaanccagcag

SEQ ID NO: 1131 - RNA, 38 nt, Artificial Sequence
  Definition of Artificial Sequence:  Enzymatic Nucleic Acid
  misc_feature (31)..(31): n stands for Inosine
gcagccaccugaugaggccguuaggccgaancacccau

SEQ ID NO: 1132 - RNA, 38 nt, Artificial Sequence
  Definition of Artificial Sequence:  Enzymatic Nucleic Acid
  misc_feature (31)..(31): n stands for Inosine
aggccugccugaugaggccguuaggccgaanccacagc

SEQ ID NO: 1133 - RNA, 38 nt, Artificial Sequence
  Definition of Artificial Sequence:  Enzymatic Nucleic Acid
  misc_feature (31)..(31): n stands for Inosine
gccaggcccugaugaggccguuaggccgaancagccac

SEQ ID NO: 1134 - RNA, 38 nt, Artificial Sequence
  Definition of Artificial Sequence:  Enzymatic Nucleic Acid
  misc_feature (31)..(31): n stands for Inosine
accugccacugaugaggccguuaggccgaanccugcag

SEQ ID NO: 1135 - RNA, 38 nt, Artificial Sequence
  Definition of Artificial Sequence:  Enzymatic Nucleic Acid
  misc_feature (31)..(31): n stands for Inosine
caccugcccugaugaggccguuaggccgaangccugca

SEQ ID NO: 1136 - RNA, 38 nt, Artificial Sequence
  Definition of Artificial Sequence:  Enzymatic Nucleic Acid
  misc_feature (31)..(31): n stands for Inosine
cugccacccugaugaggccguuaggccgaanccaggcc

SEQ ID NO: 1137 - RNA, 38 nt, Artificial Sequence
  Definition of Artificial Sequence:  Enzymatic Nucleic Acid
  misc_feature (31)..(31): n stands for Inosine
cauggggccugaugaggccguuaggccgaanccaccug

SEQ ID NO: 1138 - RNA, 38 nt, Artificial Sequence
  Definition of Artificial Sequence:  Enzymatic Nucleic Acid
  misc_feature (31)..(31): n stands for Inosine
gggcauggcugaugaggccguuaggccgaancugccac

SEQ ID NO: 1139 - RNA, 38 nt, Artificial Sequence
  Definition of Artificial Sequence:  Enzymatic Nucleic Acid
  misc_feature (31)..(31): n stands for Inosine
ugggcaugcugaugaggccguuaggccgaangcugcca

SEQ ID NO: 1140 - RNA, 38 nt, Artificial Sequence
  Definition of Artificial Sequence:  Enzymatic Nucleic Acid
  misc_feature (31)..(31): n stands for Inosine
cugggcaucugaugaggccguuaggccgaanggcugcc

SEQ ID NO: 1141 - RNA, 38 nt, Artificial Sequence
  Definition of Artificial Sequence:  Enzymatic Nucleic Acid
  misc_feature (31)..(31): n stands for Inosine
ccugggcacugaugaggccguuaggccgaangggcugc

SEQ ID NO: 1142 - RNA, 38 nt, Artificial Sequence
  Definition of Artificial Sequence:  Enzymatic Nucleic Acid
  misc_feature (31)..(31): n stands for Inosine
ggcaccugcugaugaggccguuaggccgaancaugggg

SEQ ID NO: 1143 - RNA, 38 nt, Artificial Sequence
  Definition of Artificial Sequence:  Enzymatic Nucleic Acid
  misc_feature (31)..(31): n stands for Inosine
aggcaccucugaugaggccguuaggccgaangcauggg

SEQ ID NO: 1144 - RNA, 38 nt, Artificial Sequence
  Definition of Artificial Sequence:  Enzymatic Nucleic Acid
  misc_feature (31)..(31): n stands for Inosine
caggcacccugaugaggccguuaggccgaanggcaugg

SEQ ID NO: 1145 - RNA, 38 nt, Artificial Sequence
  Definition of Artificial Sequence:  Enzymatic Nucleic Acid
  misc_feature (31)..(31): n stands for Inosine
cauacgcacugaugaggccguuaggccgaancaccugg

SEQ ID NO: 1146 - RNA, 38 nt, Artificial Sequence
  Definition of Artificial Sequence:  Enzymatic Nucleic Acid
  misc_feature (31)..(31): n stands for Inosine
gcauacgccugaugaggccguuaggccgaangcaccug

SEQ ID NO: 1147 - RNA, 38 nt, Artificial Sequence
  Definition of Artificial Sequence:  Enzymatic Nucleic Acid
  misc_feature (31)..(31): n stands for Inosine
cucauugucugaugaggccguuaggccgaancauacgc

SEQ ID NO: 1148 - RNA, 38 nt, Artificial Sequence
  Definition of Artificial Sequence:  Enzymatic Nucleic Acid
  misc_feature (31)..(31): n stands for Inosine
gggcucaucugaugaggccguuaggccgaanuagcaua

SEQ ID NO: 1149 - RNA, 38 nt, Artificial Sequence
  Definition of Artificial Sequence:  Enzymatic Nucleic Acid
  misc_feature (31)..(31): n stands for Inosine
ucaccuugcugaugaggccguuaggccgaancucauug

SEQ ID NO: 1150 - RNA, 38 nt, Artificial Sequence
  Definition of Artificial Sequence:  Enzymatic Nucleic Acid
  misc_feature (31)..(31): n stands for Inosine
gucaccuucugaugaggccguuaggccgaangcucauu

SEQ ID NO: 1151 - RNA, 38 nt, Artificial Sequence
  Definition of Artificial Sequence:  Enzymatic Nucleic Acid
  misc_feature (31)..(31): n stands for Inosine
cgucaccucugaugaggccguuaggccgaanggcucau

SEQ ID NO: 1152 - RNA, 38 nt, Artificial Sequence
  Definition of Artificial Sequence:  Enzymatic Nucleic Acid
  misc_feature (31)..(31): n stands for Inosine
gggcagcucugaugaggccguuaggccgaanucgucac

SEQ ID NO: 1153 - RNA, 38 nt, Artificial Sequence
  Definition of Artificial Sequence:  Enzymatic Nucleic Acid
  misc_feature (31)..(31): n stands for Inosine
cugggggccugaugaggccguuaggccgaancuugucg

SEQ ID NO: 1154 - RNA, 38 nt, Artificial Sequence
  Definition of Artificial Sequence:  Enzymatic Nucleic Acid
  misc_feature (31)..(31): n stands for Inosine
cugcugggcugaugaggccguuaggccgaancagcuug

SEQ ID NO: 1155 - RNA, 38 nt, Artificial Sequence
  Definition of Artificial Sequence:  Enzymatic Nucleic Acid
  misc_feature (31)..(31): n stands for Inosine
ccugcuggcugaugaggccguuaggccgaangcagcuu

SEQ ID NO: 1156 - RNA, 38 nt, Artificial Sequence
  Definition of Artificial Sequence:  Enzymatic Nucleic Acid
  misc_feature (31)..(31): n stands for Inosine
cccugcugcugaugaggccguuaggccgaanggcagcu

SEQ ID NO: 1157 - RNA, 38 nt, Artificial Sequence
  Definition of Artificial Sequence:  Enzymatic Nucleic Acid
  misc_feature (31)..(31): n stands for Inosine
gcccugcucugaugaggccguuaggccgaangggcagc

SEQ ID NO: 1158 - RNA, 38 nt, Artificial Sequence
  Definition of Artificial Sequence:  Enzymatic Nucleic Acid
  misc_feature (31)..(31): n stands for Inosine
ggcccugccugaugaggccguuaggccgaanggggcag

SEQ ID NO: 1159 - RNA, 38 nt, Artificial Sequence
  Definition of Artificial Sequence:  Enzymatic Nucleic Acid
  misc_feature (31)..(31): n stands for Inosine
gcaggccccugaugaggccguuaggccgaancuggggg

SEQ ID NO: 1160 - RNA, 38 nt, Artificial Sequence
  Definition of Artificial Sequence:  Enzymatic Nucleic Acid
  misc_feature (31)..(31): n stands for Inosine
agccugcacugaugaggccguuaggccgaancccugcu

SEQ ID NO: 1161 - RNA, 38 nt, Artificial Sequence
  Definition of Artificial Sequence:  Enzymatic Nucleic Acid
  misc_feature (31)..(31): n stands for Inosine
cagccugccugaugaggccguuaggccgaangcccugc

SEQ ID NO: 1162 - RNA, 38 nt, Artificial Sequence
  Definition of Artificial Sequence:  Enzymatic Nucleic Acid
  misc_feature (31)..(31): n stands for Inosine
gcacagcccugaugaggccguuaggccgaancaggccc

SEQ ID NO: 1163 - RNA, 38 nt, Artificial Sequence
  Definition of Artificial Sequence:  Enzymatic Nucleic Acid
  misc_feature (31)..(31): n stands for Inosine
acgggcaccugaugaggccguuaggccgaanccugcag

SEQ ID NO: 1164 - RNA, 38 nt, Artificial Sequence
  Definition of Artificial Sequence:  Enzymatic Nucleic Acid
  misc_feature (31)..(31): n stands for Inosine
ugcccacgcugaugaggccguuaggccgaancacagcc

SEQ ID NO: 1165 - RNA, 38 nt, Artificial Sequence
  Definition of Artificial Sequence:  Enzymatic Nucleic Acid
  misc_feature (31)..(31): n stands for Inosine
augcccaccugaugaggccguuaggccgaangcacagc

SEQ ID NO: 1166 - RNA, 38 nt, Artificial Sequence
  Definition of Artificial Sequence:  Enzymatic Nucleic Acid
  misc_feature (31)..(31): n stands for Inosine
agcagggacugaugaggccguuaggccgaancccacgg

SEQ ID NO: 1167 - RNA, 38 nt, Artificial Sequence
  Definition of Artificial Sequence:  Enzymatic Nucleic Acid
  misc_feature (31)..(31): n stands for Inosine
ggcagcagcugaugaggccguuaggccgaanaugccca

SEQ ID NO: 1168 - RNA, 38 nt, Artificial Sequence
  Definition of Artificial Sequence:  Enzymatic Nucleic Acid
  misc_feature (31)..(31): n stands for Inosine
uggcagcacugaugaggccguuaggccgaangaugccc

SEQ ID NO: 1169 - RNA, 38 nt, Artificial Sequence
  Definition of Artificial Sequence:  Enzymatic Nucleic Acid
  misc_feature (31)..(31): n stands for Inosine
cuggcagccugaugaggccguuaggccgaanggaugcc

SEQ ID NO: 1170 - RNA, 38 nt, Artificial Sequence
  Definition of Artificial Sequence:  Enzymatic Nucleic Acid
  misc_feature (31)..(31): n stands for Inosine
uggcuggccugaugaggccguuaggccgaancagggau

SEQ ID NO: 1171 - RNA, 38 nt, Artificial Sequence
  Definition of Artificial Sequence:  Enzymatic Nucleic Acid
  misc_feature (31)..(31): n stands for Inosine
cgcuggcucugaugaggccguuaggccgaancagcagg

SEQ ID NO: 1172 - RNA, 38 nt, Artificial Sequence
  Definition of Artificial Sequence:  Enzymatic Nucleic Acid
  misc_feature (31)..(31): n stands for Inosine
gcgcuggccugaugaggccguuaggccgaangcagcag

SEQ ID NO: 1173 - RNA, 38 nt, Artificial Sequence
  Definition of Artificial Sequence:  Enzymatic Nucleic Acid
  misc_feature (31)..(31): n stands for Inosine
gaugcgcucugaugaggccguuaggccgaancuggcag

SEQ ID NO: 1174 - RNA, 38 nt, Artificial Sequence
  Definition of Artificial Sequence:  Enzymatic Nucleic Acid
  misc_feature (31)..(31): n stands for Inosine
agaugcgccugaugaggccguuaggccgaangcuggca

SEQ ID NO: 1175 - RNA, 38 nt, Artificial Sequence
  Definition of Artificial Sequence:  Enzymatic Nucleic Acid
  misc_feature (31)..(31): n stands for Inosine
caggaagacugaugaggccguuaggccgaancgcuggc

SEQ ID NO: 1176 - RNA, 38 nt, Artificial Sequence
  Definition of Artificial Sequence:  Enzymatic Nucleic Acid
  misc_feature (31)..(31): n stands for Inosine
gugcaggacugaugaggccguuaggccgaanaugcgcu

SEQ ID NO: 1177 - RNA, 38 nt, Artificial Sequence
  Definition of Artificial Sequence:  Enzymatic Nucleic Acid
  misc_feature (31)..(31): n stands for Inosine
gccgugcacugaugaggccguuaggccgaanaagaugc

SEQ ID NO: 1178 - RNA, 38 nt, Artificial Sequence
  Definition of Artificial Sequence:  Enzymatic Nucleic Acid
  misc_feature (31)..(31): n stands for Inosine
ugccgugccugaugaggccguuaggccgaangaagaug

SEQ ID NO: 1179 - RNA, 38 nt, Artificial Sequence
  Definition of Artificial Sequence:  Enzymatic Nucleic Acid
  misc_feature (31)..(31): n stands for Inosine
gguugccgcugaugaggccguuaggccgaancaggaag

SEQ ID NO: 1180 - RNA, 38 nt, Artificial Sequence; identical to SEQ ID NO: 1179
  Definition of Artificial Sequence:  Enzymatic Nucleic Acid
  misc_feature (31)..(31): n stands for Inosine

SEQ ID NO: 1181 - RNA, 38 nt, Artificial Sequence
  Definition of Artificial Sequence:  Enzymatic Nucleic Acid
  misc_feature (31)..(31): n stands for Inosine
gaugcggucugaugaggccguuaggccgaanccgugca

SEQ ID NO: 1182 - RNA, 38 nt, Artificial Sequence; identical to SEQ ID NO: 1181
  Definition of Artificial Sequence:  Enzymatic Nucleic Acid
  misc_feature (31)..(31): n stands for Inosine

SEQ ID NO: 1183 - RNA, 38 nt, Artificial Sequence
  Definition of Artificial Sequence:  Enzymatic Nucleic Acid
  misc_feature (31)..(31): n stands for Inosine
cgagaugccugaugaggccguuaggccgaanuugccgu

SEQ ID NO: 1184 - RNA, 38 nt, Artificial Sequence
  Definition of Artificial Sequence:  Enzymatic Nucleic Acid
  misc_feature (31)..(31): n stands for Inosine
augcgagacugaugaggccguuaggccgaancgguugc

SEQ ID NO: 1185 - RNA, 38 nt, Artificial Sequence
  Definition of Artificial Sequence:  Enzymatic Nucleic Acid
  misc_feature (31)..(31): n stands for Inosine
cacaugcgcugaugaggccguuaggccgaanaugcggu

SEQ ID NO: 1186 - RNA, 38 nt, Artificial Sequence
  Definition of Artificial Sequence:  Enzymatic Nucleic Acid
  misc_feature (31)..(31): n stands for Inosine
cuggcacacugaugaggccguuaggccgaancgagaug

SEQ ID NO: 1187 - RNA, 38 nt, Artificial Sequence
  Definition of Artificial Sequence:  Enzymatic Nucleic Acid
  misc_feature (31)..(31): n stands for Inosine
uggcagcucugaugaggccguuaggccgaancacaugc

SEQ ID NO: 1188 - RNA, 38 nt, Artificial Sequence
  Definition of Artificial Sequence:  Enzymatic Nucleic Acid
  misc_feature (31)..(31): n stands for Inosine
cuggcagccugaugaggccguuaggccgaangcacaug

SEQ ID NO: 1189 - RNA, 38 nt, Artificial Sequence
  Definition of Artificial Sequence:  Enzymatic Nucleic Acid
  misc_feature (31)..(31): n stands for Inosine
aagcuggccugaugaggccguuaggccgaancuggcac

SEQ ID NO: 1190 - RNA, 38 nt, Artificial Sequence
  Definition of Artificial Sequence:  Enzymatic Nucleic Acid
  misc_feature (31)..(31): n stands for Inosine
cggaagcucugaugaggccguuaggccgaancagcugg

SEQ ID NO: 1191 - RNA, 38 nt, Artificial Sequence
  Definition of Artificial Sequence:  Enzymatic Nucleic Acid
  misc_feature (31)..(31): n stands for Inosine
acggaagccugaugaggccguuaggccgaangcagcug

SEQ ID NO: 1192 - RNA, 38 nt, Artificial Sequence
  Definition of Artificial Sequence:  Enzymatic Nucleic Acid
  misc_feature (31)..(31): n stands for Inosine
ggcacggacugaugaggccguuaggccgaancuggcag

SEQ ID NO: 1193 - RNA, 38 nt, Artificial Sequence
  Definition of Artificial Sequence:  Enzymatic Nucleic Acid
  misc_feature (31)..(31): n stands for Inosine
gcaggcaccugaugaggccguuaggccgaanaagcugg

SEQ ID NO: 1194 - RNA, 38 nt, Artificial Sequence
  Definition of Artificial Sequence:  Enzymatic Nucleic Acid
  misc_feature (31)..(31): n stands for Inosine
uugcggcacugaugaggccguuaggccgaancacggaa

SEQ ID NO: 1195 - RNA, 38 nt, Artificial Sequence
  Definition of Artificial Sequence:  Enzymatic Nucleic Acid
  misc_feature (31)..(31): n stands for Inosine
guugcggccugaugaggccguuaggccgaangcacgga

SEQ ID NO: 1196 - RNA, 38 nt, Artificial Sequence
  Definition of Artificial Sequence:  Enzymatic Nucleic Acid
  misc_feature (31)..(31): n stands for Inosine
gagguugccugaugaggccguuaggccgaancaggcac

SEQ ID NO: 1197 - RNA, 38 nt, Artificial Sequence
  Definition of Artificial Sequence:  Enzymatic Nucleic Acid
  misc_feature (31)..(31): n stands for Inosine
ggugaggucugaugaggccguuaggccgaancggcagg

SEQ ID NO: 1198 - RNA, 38 nt, Artificial Sequence
  Definition of Artificial Sequence:  Enzymatic Nucleic Acid
  misc_feature (31)..(31): n stands for Inosine
gauggugacugaugaggccguuaggccgaanuugcggc

SEQ ID NO: 1199 - RNA, 38 nt, Artificial Sequence
  Definition of Artificial Sequence:  Enzymatic Nucleic Acid
  misc_feature (31)..(31): n stands for Inosine
ggauggugcugaugaggccguuaggccgaanguugcgg

SEQ ID NO: 1200 - RNA, 38 nt, Artificial Sequence
  Definition of Artificial Sequence:  Enzymatic Nucleic Acid
  misc_feature (31)..(31): n stands for Inosine
caggauggcugaugaggccguuaggccgaanagguugc

SEQ ID NO: 1201 - RNA, 38 nt, Artificial Sequence
  Definition of Artificial Sequence:  Enzymatic Nucleic Acid
  misc_feature (31)..(31): n stands for Inosine
cacaggaucugaugaggccguuaggccgaanugagguu

SEQ ID NO: 1202 - RNA, 38 nt, Artificial Sequence
  Definition of Artificial Sequence:  Enzymatic Nucleic Acid
  misc_feature (31)..(31): n stands for Inosine
ccacaggacugaugaggccguuaggccgaangugaggu

SEQ ID NO: 1203 - RNA, 38 nt, Artificial Sequence
  Definition of Artificial Sequence:  Enzymatic Nucleic Acid
  misc_feature (31)..(31): n stands for Inosine
cagccacacugaugaggccguuaggccgaanaugguga

SEQ ID NO: 1204 - RNA, 38 nt, Artificial Sequence
  Definition of Artificial Sequence:  Enzymatic Nucleic Acid
  misc_feature (31)..(31): n stands for Inosine
gcagccaccugaugaggccguuaggccgaangauggug

SEQ ID NO: 1205 - RNA, 38 nt, Artificial Sequence
  Definition of Artificial Sequence:  Enzymatic Nucleic Acid
  misc_feature (31)..(31): n stands for Inosine
ucgagugccugaugaggccguuaggccgaanccacagg

SEQ ID NO: 1206 - RNA, 38 nt, Artificial Sequence
  Definition of Artificial Sequence:  Enzymatic Nucleic Acid
  misc_feature (31)..(31): n stands for Inosine
cauucgagcugaugaggccguuaggccgaancagccac

SEQ ID NO: 1207 - RNA, 38 nt, Artificial Sequence
  Definition of Artificial Sequence:  Enzymatic Nucleic Acid
  misc_feature (31)..(31): n stands for Inosine
cacauucgcugaugaggccguuaggccgaanugcagcc

SEQ ID NO: 1208 - RNA, 38 nt, Artificial Sequence
  Definition of Artificial Sequence:  Enzymatic Nucleic Acid
  misc_feature (31)..(31): n stands for Inosine
uucgggcccugaugaggccguuaggccgaancacauuc

SEQ ID NO: 1209 - RNA, 38 nt, Artificial Sequence
  Definition of Artificial Sequence:  Enzymatic Nucleic Acid
  misc_feature (31)..(31): n stands for Inosine
ucaauucgcugaugaggccguuaggccgaanccagcac

SEQ ID NO: 1210 - RNA, 38 nt, Artificial Sequence
  Definition of Artificial Sequence:  Enzymatic Nucleic Acid
  misc_feature (31)..(31): n stands for Inosine
aucaauuccugaugaggccguuaggccgaangccagca

SEQ ID NO: 1211 - RNA, 38 nt, Artificial Sequence
  Definition of Artificial Sequence:  Enzymatic Nucleic Acid
  misc_feature (31)..(31): n stands for Inosine
gugaaggccugaugaggccguuaggccgaanccgcauc

SEQ ID NO: 1212 - RNA, 38 nt, Artificial Sequence
  Definition of Artificial Sequence:  Enzymatic Nucleic Acid
  misc_feature (31)..(31): n stands for Inosine
ccagugaacugaugaggccguuaggccgaancagccgc

SEQ ID NO: 1213 - RNA, 38 nt, Artificial Sequence
  Definition of Artificial Sequence:  Enzymatic Nucleic Acid
  misc_feature (31)..(31): n stands for Inosine
gccagugacugaugaggccguuaggccgaangcagccg

SEQ ID NO: 1214 - RNA, 38 nt, Artificial Sequence
  Definition of Artificial Sequence:  Enzymatic Nucleic Acid
  misc_feature (31)..(31): n stands for Inosine
caggccagcugaugaggccguuaggccgaanaaggcag

SEQ ID NO: 1215 - RNA, 38 nt, Artificial Sequence
  Definition of Artificial Sequence:  Enzymatic Nucleic Acid
  misc_feature (31)..(31): n stands for Inosine
gccaggcccugaugaggccguuaggccgaanugaaggc

SEQ ID NO: 1216 - RNA, 38 nt, Artificial Sequence
  Definition of Artificial Sequence:  Enzymatic Nucleic Acid
  misc_feature (31)..(31): n stands for Inosine
gagggccacugaugaggccguuaggccgaanccaguga

SEQ ID NO: 1217 - RNA, 38 nt, Artificial Sequence
  Definition of Artificial Sequence:  Enzymatic Nucleic Acid
  misc_feature (31)..(31): n stands for Inosine
ggagggcccugaugaggccguuaggccgaangccagug

SEQ ID NO: 1218 - RNA, 38 nt, Artificial Sequence
  Definition of Artificial Sequence:  Enzymatic Nucleic Acid
  misc_feature (31)..(31): n stands for Inosine
uccaggagcugaugaggccguuaggccgaanccaggcc

SEQ ID NO: 1219 - RNA, 38 nt, Artificial Sequence
  Definition of Artificial Sequence:  Enzymatic Nucleic Acid
  misc_feature (31)..(31): n stands for Inosine
cuccaggacugaugaggccguuaggccgaangccaggc

SEQ ID NO: 1220 - RNA, 38 nt, Artificial Sequence
  Definition of Artificial Sequence:  Enzymatic Nucleic Acid
  misc_feature (31)..(31): n stands for Inosine
gcuccaggcugaugaggccguuaggccgaanggccagg

SEQ ID NO: 1221 - RNA, 38 nt, Artificial Sequence
  Definition of Artificial Sequence:  Enzymatic Nucleic Acid
  misc_feature (31)..(31): n stands for Inosine
cugcuccacugaugaggccguuaggccgaanagggcca

SEQ ID NO: 1222 - RNA, 38 nt, Artificial Sequence
  Definition of Artificial Sequence:  Enzymatic Nucleic Acid
  misc_feature (31)..(31): n stands for Inosine
gcugcucccugaugaggccguuaggccgaangagggcc

SEQ ID NO: 1223 - RNA, 38 nt, Artificial Sequence
  Definition of Artificial Sequence:  Enzymatic Nucleic Acid
  misc_feature (31)..(31): n stands for Inosine
gguccagccugaugaggccguuaggccgaancuccagg

SEQ ID NO: 1224 - RNA, 38 nt, Artificial Sequence
  Definition of Artificial Sequence:  Enzymatic Nucleic Acid
  misc_feature (31)..(31): n stands for Inosine
ugaggucccugaugaggccguuaggccgaancugcucc

SEQ ID NO: 1225 - RNA, 38 nt, Artificial Sequence
  Definition of Artificial Sequence:  Enzymatic Nucleic Acid
  misc_feature (31)..(31): n stands for Inosine
aucgcugacugaugaggccguuaggccgaanuccagcu

SEQ ID NO: 1226 - RNA, 38 nt, Artificial Sequence
  Definition of Artificial Sequence:  Enzymatic Nucleic Acid
  misc_feature (31)..(31): n stands for Inosine
uaucgcugcugaugaggccguuaggccgaanguccagc

SEQ ID NO: 1227 - RNA, 38 nt, Artificial Sequence
  Definition of Artificial Sequence:  Enzymatic Nucleic Acid
  misc_feature (31)..(31): n stands for Inosine
auuaucgccugaugaggccguuaggccgaanaggucca

SEQ ID NO: 1228 - RNA, 38 nt, Artificial Sequence
  Definition of Artificial Sequence:  Enzymatic Nucleic Acid
  misc_feature (31)..(31): n stands for Inosine
cggagcugcugaugaggccguuaggccgaancauuauc

SEQ ID NO: 1229 - RNA, 38 nt, Artificial Sequence
  Definition of Artificial Sequence:  Enzymatic Nucleic Acid
  misc_feature (31)..(31): n stands for Inosine
accggagccugaugaggccguuaggccgaanugcauua

SEQ ID NO: 1230 - RNA, 38 nt, Artificial Sequence
  Definition of Artificial Sequence:  Enzymatic Nucleic Acid
  misc_feature (31)..(31): n stands for Inosine
cagaccggcugaugaggccguuaggccgaancugugca

SEQ ID NO: 1231 - RNA, 38 nt, Artificial Sequence
  Definition of Artificial Sequence:  Enzymatic Nucleic Acid
  misc_feature (31)..(31): n stands for Inosine
cacagacccugaugaggccguuaggccgaanagcugug

SEQ ID NO: 1232 - RNA, 38 nt, Artificial Sequence
  Definition of Artificial Sequence:  Enzymatic Nucleic Acid
  misc_feature (31)..(31): n stands for Inosine
ggguccaccugaugaggccguuaggccgaanaccggag

SEQ ID NO: 1233 - RNA, 38 nt, Artificial Sequence
  Definition of Artificial Sequence:  Enzymatic Nucleic Acid
  misc_feature (31)..(31): n stands for Inosine
uguggcagcugaugaggccguuaggccgaanuccacag

SEQ ID NO: 1234 - RNA, 38 nt, Artificial Sequence
  Definition of Artificial Sequence:  Enzymatic Nucleic Acid
  misc_feature (31)..(31): n stands for Inosine
auguggcacugaugaggccguuaggccgaanguccaca

SEQ ID NO: 1235 - RNA, 38 nt, Artificial Sequence
  Definition of Artificial Sequence:  Enzymatic Nucleic Acid
  misc_feature (31)..(31): n stands for Inosine
aauguggccugaugaggccguuaggccgaangguccac

SEQ ID NO: 1236 - RNA, 38 nt, Artificial Sequence
  Definition of Artificial Sequence:  Enzymatic Nucleic Acid
  misc_feature (31)..(31): n stands for Inosine
uggaaugucugaugaggccguuaggccgaancaggguc

SEQ ID NO: 1237 - RNA, 38 nt, Artificial Sequence
  Definition of Artificial Sequence:  Enzymatic Nucleic Acid
  misc_feature (31)..(31): n stands for Inosine
guggaaugcugaugaggccguuaggccgaangcagggu

SEQ ID NO: 1238 - RNA, 38 nt, Artificial Sequence
  Definition of Artificial Sequence:  Enzymatic Nucleic Acid
  misc_feature (31)..(31): n stands for Inosine
ccguggaacugaugaggccguuaggccgaanuggcagg

SEQ ID NO: 1239 - RNA, 38 nt, Artificial Sequence
  Definition of Artificial Sequence:  Enzymatic Nucleic Acid
  misc_feature (31)..(31): n stands for Inosine
caggccgucugaugaggccguuaggccgaanaaugugg

SEQ ID NO: 1240 - RNA, 38 nt, Artificial Sequence
  Definition of Artificial Sequence:  Enzymatic Nucleic Acid
  misc_feature (31)..(31): n stands for Inosine
ccaggccgcugaugaggccguuaggccgaangaaugug

SEQ ID NO: 1241 - RNA, 38 nt, Artificial Sequence
  Definition of Artificial Sequence:  Enzymatic Nucleic Acid
  misc_feature (31)..(31): n stands for Inosine
gcggcccacugaugaggccguuaggccgaanccgugga

SEQ ID NO: 1242 - RNA, 38 nt, Artificial Sequence
  Definition of Artificial Sequence:  Enzymatic Nucleic Acid
  misc_feature (31)..(31): n stands for Inosine
ggcggccccugaugaggccguuaggccgaangccgugg

SEQ ID NO: 1243 - RNA, 38 nt, Artificial Sequence
  Definition of Artificial Sequence:  Enzymatic Nucleic Acid
  misc_feature (31)..(31): n stands for Inosine
guguaggccugaugaggccguuaggccgaancccaggc

SEQ ID NO: 1244 - RNA, 38 nt, Artificial Sequence
  Definition of Artificial Sequence:  Enzymatic Nucleic Acid
  misc_feature (31)..(31): n stands for Inosine
cguguguacugaugaggccguuaggccgaancggccca

SEQ ID NO: 1245 - RNA, 38 nt, Artificial Sequence
  Definition of Artificial Sequence:  Enzymatic Nucleic Acid
  misc_feature (31)..(31): n stands for Inosine
gcgugugucugaugaggccguuaggccgaangcggccc

SEQ ID NO: 1246 - RNA, 38 nt, Artificial Sequence
  Definition of Artificial Sequence:  Enzymatic Nucleic Acid
  misc_feature (31)..(31): n stands for Inosine
gcagcgugcugaugaggccguuaggccgaanuaggcgg

SEQ ID NO: 1247 - RNA, 38 nt, Artificial Sequence
  Definition of Artificial Sequence:  Enzymatic Nucleic Acid
  misc_feature (31)..(31): n stands for Inosine
gugcagcgcugaugaggccguuaggccgaanuguaggc

SEQ ID NO: 1248 - RNA, 38 nt, Artificial Sequence
  Definition of Artificial Sequence:  Enzymatic Nucleic Acid
  misc_feature (31)..(31): n stands for Inosine
ccaggugccugaugaggccguuaggccgaancgugugu

SEQ ID NO: 1249 - RNA, 38 nt, Artificial Sequence
  Definition of Artificial Sequence:  Enzymatic Nucleic Acid
  misc_feature (31)..(31): n stands for Inosine
gguccaggcugaugaggccguuaggccgaancagcgug

SEQ ID NO: 1250 - RNA, 38 nt, Artificial Sequence
  Definition of Artificial Sequence:  Enzymatic Nucleic Acid
  misc_feature (31)..(31): n stands for Inosine
gcgguccacugaugaggccguuaggccgaanugcagcg

SEQ ID NO: 1251 - RNA, 38 nt, Artificial Sequence
  Definition of Artificial Sequence:  Enzymatic Nucleic Acid
  misc_feature (31)..(31): n stands for Inosine
agcggucccugaugaggccguuaggccgaangugcagc

SEQ ID NO: 1252 - RNA, 38 nt, Artificial Sequence
  Definition of Artificial Sequence:  Enzymatic Nucleic Acid
  misc_feature (31)..(31): n stands for Inosine
gccgcagccugaugaggccguuaggccgaanuccaggu

SEQ ID NO: 1253 - RNA, 38 nt, Artificial Sequence
  Definition of Artificial Sequence:  Enzymatic Nucleic Acid
  misc_feature (31)..(31): n stands for Inosine
caggccgccugaugaggccguuaggccgaancggucca

SEQ ID NO: 1254 - RNA, 38 nt, Artificial Sequence
  Definition of Artificial Sequence:  Enzymatic Nucleic Acid
  misc_feature (31)..(31): n stands for Inosine
cuccugcacugaugaggccguuaggccgaanccgcagc

SEQ ID NO: 1255 - RNA, 38 nt, Artificial Sequence
  Definition of Artificial Sequence:  Enzymatic Nucleic Acid
  misc_feature (31)..(31): n stands for Inosine
gcuccugccugaugaggccguuaggccgaangccgcag

SEQ ID NO: 1256 - RNA, 38 nt, Artificial Sequence
  Definition of Artificial Sequence:  Enzymatic Nucleic Acid
  misc_feature (31)..(31): n stands for Inosine
ccagcucccugaugaggccguuaggccgaancaggccg

SEQ ID NO: 1257 - RNA, 38 nt, Artificial Sequence
  Definition of Artificial Sequence:  Enzymatic Nucleic Acid
  misc_feature (31)..(31): n stands for Inosine
ccgggccccugaugaggccguuaggccgaancuccugc

SEQ ID NO: 1258 - RNA, 38 nt, Artificial Sequence
  Definition of Artificial Sequence:  Enzymatic Nucleic Acid
  misc_feature (31)..(31): n stands for Inosine
cagccccgcugaugaggccguuaggccgaancccagcu

SEQ ID NO: 1259 - RNA, 38 nt, Artificial Sequence
  Definition of Artificial Sequence:  Enzymatic Nucleic Acid
  misc_feature (31)..(31): n stands for Inosine
acagcccccugaugaggccguuaggccgaangcccagc

SEQ ID NO: 1260 - RNA, 38 nt, Artificial Sequence
  Definition of Artificial Sequence:  Enzymatic Nucleic Acid
  misc_feature (31)..(31): n stands for Inosine
cgcggaaccugaugaggccguuaggccgaanccccggg

SEQ ID NO: 1261 - RNA, 38 nt, Artificial Sequence
  Definition of Artificial Sequence:  Enzymatic Nucleic Acid
  misc_feature (31)..(31): n stands for Inosine
caggccgccugaugaggccguuaggccgaanaacagcc

SEQ ID NO: 1262 - RNA, 38 nt, Artificial Sequence
  Definition of Artificial Sequence:  Enzymatic Nucleic Acid
  misc_feature (31)..(31): n stands for Inosine
ggcagccacugaugaggccguuaggccgaanccgcgga

SEQ ID NO: 1263 - RNA, 38 nt, Artificial Sequence
  Definition of Artificial Sequence:  Enzymatic Nucleic Acid
  misc_feature (31)..(31): n stands for Inosine
gggcagcccugaugaggccguuaggccgaangccgcgg

SEQ ID NO: 1264 - RNA, 38 nt, Artificial Sequence
  Definition of Artificial Sequence:  Enzymatic Nucleic Acid
  misc_feature (31)..(31): n stands for Inosine
ugcagggccugaugaggccguuaggccgaanccaggcc

SEQ ID NO: 1265 - RNA, 38 nt, Artificial Sequence
  Definition of Artificial Sequence:  Enzymatic Nucleic Acid
  misc_feature (31)..(31): n stands for Inosine
uacugcagcugaugaggccguuaggccgaancagccag

SEQ ID NO: 1266 - RNA, 38 nt, Artificial Sequence
  Definition of Artificial Sequence:  Enzymatic Nucleic Acid
  misc_feature (31)..(31): n stands for Inosine
guacugcacugaugaggccguuaggccgaangcagcca

SEQ ID NO: 1267 - RNA, 38 nt, Artificial Sequence
  Definition of Artificial Sequence:  Enzymatic Nucleic Acid
  misc_feature (31)..(31): n stands for Inosine
gguacugccugaugaggccguuaggccgaanggcagcc

SEQ ID NO: 1268 - RNA, 38 nt, Artificial Sequence
  Definition of Artificial Sequence:  Enzymatic Nucleic Acid
  misc_feature (31)..(31): n stands for Inosine
agagguaccugaugaggccguuaggccgaancagggca

SEQ ID NO: 1269 - RNA, 38 nt, Artificial Sequence
  Definition of Artificial Sequence:  Enzymatic Nucleic Acid
  misc_feature (31)..(31): n stands for Inosine
cagguagacugaugaggccguuaggccgaanuacugca

SEQ ID NO: 1270 - RNA, 38 nt, Artificial Sequence
  Definition of Artificial Sequence:  Enzymatic Nucleic Acid
  misc_feature (31)..(31): n stands for Inosine
gcagguagcugaugaggccguuaggccgaanguacugc

SEQ ID NO: 1271 - RNA, 38 nt, Artificial Sequence
  Definition of Artificial Sequence:  Enzymatic Nucleic Acid
  misc_feature (31)..(31): n stands for Inosine
cugcaggucugaugaggccguuaggccgaanagguacu

SEQ ID NO: 1272 - RNA, 38 nt, Artificial Sequence
  Definition of Artificial Sequence:  Enzymatic Nucleic Acid
  misc_feature (31)..(31): n stands for Inosine
guccugcacugaugaggccguuaggccgaanuagaggu

SEQ ID NO: 1273 - RNA, 38 nt, Artificial Sequence
  Definition of Artificial Sequence:  Enzymatic Nucleic Acid
  misc_feature (31)..(31): n stands for Inosine
uguccugccugaugaggccguuaggccgaanguagagg

SEQ ID NO: 1274 - RNA, 38 nt, Artificial Sequence
  Definition of Artificial Sequence:  Enzymatic Nucleic Acid
  misc_feature (31)..(31): n stands for Inosine
cguugucccugaugaggccguuaggccgaancagguag

SEQ ID NO: 1275 - RNA, 38 nt, Artificial Sequence
  Definition of Artificial Sequence:  Enzymatic Nucleic Acid
  misc_feature (31)..(31): n stands for Inosine
cagcgcgucugaugaggccguuaggccgaanuccugca

SEQ ID NO: 1276 - RNA, 38 nt, Artificial Sequence
  Definition of Artificial Sequence:  Enzymatic Nucleic Acid
  misc_feature (31)..(31): n stands for Inosine
gugccugccugaugaggccguuaggccgaancgcguug

SEQ ID NO: 1277 - RNA, 38 nt, Artificial Sequence
  Definition of Artificial Sequence:  Enzymatic Nucleic Acid
  misc_feature (31)..(31): n stands for Inosine
gcagugcccugaugaggccguuaggccgaancagcgcg

SEQ ID NO: 1278 - RNA, 38 nt, Artificial Sequence
  Definition of Artificial Sequence:  Enzymatic Nucleic Acid
  misc_feature (31)..(31): n stands for Inosine
ucaggcagcugaugaggccguuaggccgaanccugcag

SEQ ID NO: 1279 - RNA, 38 nt, Artificial Sequence
  Definition of Artificial Sequence:  Enzymatic Nucleic Acid
  misc_feature (31)..(31): n stands for Inosine
caucaggccugaugaggccguuaggccgaanugccugc

SEQ ID NO: 1280 - RNA, 38 nt, Artificial Sequence
  Definition of Artificial Sequence:  Enzymatic Nucleic Acid
  misc_feature (31)..(31): n stands for Inosine
ugucaucacugaugaggccguuaggccgaancagugcc

SEQ ID NO: 1281 - RNA, 38 nt, Artificial Sequence
  Definition of Artificial Sequence:  Enzymatic Nucleic Acid
  misc_feature (31)..(31): n stands for Inosine
gugucauccugaugaggccguuaggccgaangcagugc

SEQ ID NO: 1282 - RNA, 38 nt, Artificial Sequence
  Definition of Artificial Sequence:  Enzymatic Nucleic Acid
  misc_feature (31)..(31): n stands for Inosine
gcggaaggcugaugaggccguuaggccgaanucaucag

SEQ ID NO: 1283 - RNA, 38 nt, Artificial Sequence
  Definition of Artificial Sequence:  Enzymatic Nucleic Acid
  misc_feature (31)..(31): n stands for Inosine
ucgcggaacugaugaggccguuaggccgaanugucauc

SEQ ID NO: 1284 - RNA, 38 nt, Artificial Sequence
  Definition of Artificial Sequence:  Enzymatic Nucleic Acid
  misc_feature (31)..(31): n stands for Inosine
gucgcggacugaugaggccguuaggccgaangugucau

SEQ ID NO: 1285 - RNA, 38 nt, Artificial Sequence
  Definition of Artificial Sequence:  Enzymatic Nucleic Acid
  misc_feature (31)..(31): n stands for Inosine
caggucgccugaugaggccguuaggccgaanaaggugu

SEQ ID NO: 1286 - RNA, 38 nt, Artificial Sequence
  Definition of Artificial Sequence:  Enzymatic Nucleic Acid
  misc_feature (31)..(31): n stands for Inosine
guugcccacugaugaggccguuaggccgaanucgcgga

SEQ ID NO: 1287 - RNA, 38 nt, Artificial Sequence
  Definition of Artificial Sequence:  Enzymatic Nucleic Acid
  misc_feature (31)..(31): n stands for Inosine
gguugccccugaugaggccguuaggccgaangucgcgg

SEQ ID NO: 1288 - RNA, 38 nt, Artificial Sequence
  Definition of Artificial Sequence:  Enzymatic Nucleic Acid
  misc_feature (31)..(31): n stands for Inosine
ugugaggucugaugaggccguuaggccgaancccaggu

SEQ ID NO: 1289 - RNA, 38 nt, Artificial Sequence
  Definition of Artificial Sequence:  Enzymatic Nucleic Acid
  misc_feature (31)..(31): n stands for Inosine
gugugugacugaugaggccguuaggccgaanuugccca

SEQ ID NO: 1290 - RNA, 38 nt, Artificial Sequence
  Definition of Artificial Sequence:  Enzymatic Nucleic Acid
  misc_feature (31)..(31): n stands for Inosine
ggugugugcugaugaggccguuaggccgaanguugccc

SEQ ID NO: 1291 - RNA, 38 nt, Artificial Sequence
  Definition of Artificial Sequence:  Enzymatic Nucleic Acid
  misc_feature (31)..(31): n stands for Inosine
gaggugugcugaugaggccguuaggccgaanagguugc

SEQ ID NO: 1292 - RNA, 38 nt, Artificial Sequence
  Definition of Artificial Sequence:  Enzymatic Nucleic Acid
  misc_feature (31)..(31): n stands for Inosine
aagaggugcugaugaggccguuaggccgaanugagguu

SEQ ID NO: 1293 - RNA, 38 nt, Artificial Sequence
  Definition of Artificial Sequence:  Enzymatic Nucleic Acid
  misc_feature (31)..(31): n stands for Inosine
ggaagaggcugaugaggccguuaggccgaanugugagg

SEQ ID NO: 1294 - RNA, 38 nt, Artificial Sequence
  Definition of Artificial Sequence:  Enzymatic Nucleic Acid
  misc_feature (31)..(31): n stands for Inosine
caggaagacugaugaggccguuaggccgaanuguguga

SEQ ID NO: 1295 - RNA, 38 nt, Artificial Sequence
  Definition of Artificial Sequence:  Enzymatic Nucleic Acid
  misc_feature (31)..(31): n stands for Inosine
gcaggaagcugaugaggccguuaggccgaangugugug

SEQ ID NO: 1296 - RNA, 38 nt, Artificial Sequence
  Definition of Artificial Sequence:  Enzymatic Nucleic Acid
  misc_feature (31)..(31): n stands for Inosine
gugcaggacugaugaggccguuaggccgaanaggugug

SEQ ID NO: 1297 - RNA, 38 nt, Artificial Sequence
  Definition of Artificial Sequence:  Enzymatic Nucleic Acid
  misc_feature (31)..(31): n stands for Inosine
gccgugcacugaugaggccguuaggccgaanaagaggu

SEQ ID NO: 1298 - RNA, 38 nt, Artificial Sequence
  Definition of Artificial Sequence:  Enzymatic Nucleic Acid
  misc_feature (31)..(31): n stands for Inosine
ugccgugccugaugaggccguuaggccgaangaagagg

SEQ ID NO: 1299 - RNA, 38 nt, Artificial Sequence
  Definition of Artificial Sequence:  Enzymatic Nucleic Acid
  misc_feature (31)..(31): n stands for Inosine
ggagaugccugaugaggccguuaggccgaanuugccgu

SEQ ID NO: 1300 - RNA, 38 nt, Artificial Sequence
  Definition of Artificial Sequence:  Enzymatic Nucleic Acid
  misc_feature (31)..(31): n stands for Inosine
gcuggagacugaugaggccguuaggccgaancgguugc

SEQ ID NO: 1301 - RNA, 38 nt, Artificial Sequence
  Definition of Artificial Sequence:  Enzymatic Nucleic Acid
  misc_feature (31)..(31): n stands for Inosine
cacgcuggcugaugaggccguuaggccgaanaugcggu

SEQ ID NO: 1302 - RNA, 38 nt, Artificial Sequence
  Definition of Artificial Sequence:  Enzymatic Nucleic Acid
  misc_feature (31)..(31): n stands for Inosine
ggcacgcucugaugaggccguuaggccgaanagaugcg

SEQ ID NO: 1303 - RNA, 38 nt, Artificial Sequence
  Definition of Artificial Sequence:  Enzymatic Nucleic Acid
  misc_feature (31)..(31): n stands for Inosine
gggcacgccugaugaggccguuaggccgaangagaugc

SEQ ID NO: 1304 - RNA, 38 nt, Artificial Sequence
  Definition of Artificial Sequence:  Enzymatic Nucleic Acid
  misc_feature (31)..(31): n stands for Inosine
cgcgcucgcugaugaggccguuaggccgaancacgcug

SEQ ID NO: 1305 - RNA, 38 nt, Artificial Sequence
  Definition of Artificial Sequence:  Enzymatic Nucleic Acid
  misc_feature (31)..(31): n stands for Inosine
gcgcgcuccugaugaggccguuaggccgaangcacgcu

SEQ ID NO: 1306 - RNA, 38 nt, Artificial Sequence
  Definition of Artificial Sequence:  Enzymatic Nucleic Acid
  misc_feature (31)..(31): n stands for Inosine
ccacggaacugaugaggccguuaggccgaancgcgcuc

SEQ ID NO: 1307 - RNA, 38 nt, Artificial Sequence
  Definition of Artificial Sequence:  Enzymatic Nucleic Acid
  misc_feature (31)..(31): n stands for Inosine
cccacggacugaugaggccguuaggccgaangcgcgcu

SEQ ID NO: 1308 - RNA, 38 nt, Artificial Sequence
  Definition of Artificial Sequence:  Enzymatic Nucleic Acid
  misc_feature (31)..(31): n stands for Inosine
cagcccaccugaugaggccguuaggccgaanaaggcgc

SEQ ID NO: 1309 - RNA, 38 nt, Artificial Sequence
  Definition of Artificial Sequence:  Enzymatic Nucleic Acid
  misc_feature (31)..(31): n stands for Inosine
ggcugugccugaugaggccguuaggccgaancccacgg

SEQ ID NO: 1310 - RNA, 38 nt, Artificial Sequence
  Definition of Artificial Sequence:  Enzymatic Nucleic Acid
  misc_feature (31)..(31): n stands for Inosine
cgaggcugcugaugaggccguuaggccgaancagccca

SEQ ID NO: 1311 - RNA, 38 nt, Artificial Sequence
  Definition of Artificial Sequence:  Enzymatic Nucleic Acid
  misc_feature (31)..(31): n stands for Inosine
gucgaggccugaugaggccguuaggccgaanugcagcc

SEQ ID NO: 1312 - RNA, 38 nt, Artificial Sequence
  Definition of Artificial Sequence:  Enzymatic Nucleic Acid
  misc_feature (31)..(31): n stands for Inosine
acggucgacugaugaggccguuaggccgaancugugca

SEQ ID NO: 1313 - RNA, 38 nt, Artificial Sequence
  Definition of Artificial Sequence:  Enzymatic Nucleic Acid
  misc_feature (31)..(31): n stands for Inosine
gacggucgcugaugaggccguuaggccgaangcugugc

SEQ ID NO: 1314 - RNA, 38 nt, Artificial Sequence
  Definition of Artificial Sequence:  Enzymatic Nucleic Acid
  misc_feature (31)..(31): n stands for Inosine
uaggagaccugaugaggccguuaggccgaanucgaggc

SEQ ID NO: 1315 - RNA, 38 nt, Artificial Sequence
  Definition of Artificial Sequence:  Enzymatic Nucleic Acid
  misc_feature (31)..(31): n stands for Inosine
gcaguaggcugaugaggccguuaggccgaanacggucg

SEQ ID NO: 1316 - RNA, 38 nt, Artificial Sequence
  Definition of Artificial Sequence:  Enzymatic Nucleic Acid
  misc_feature (31)..(31): n stands for Inosine
gugcaguacugaugaggccguuaggccgaanagacggu

SEQ ID NO: 1317 - RNA, 38 nt, Artificial Sequence
  Definition of Artificial Sequence:  Enzymatic Nucleic Acid
  misc_feature (31)..(31): n stands for Inosine
ggugcagucugaugaggccguuaggccgaangagacgg

SEQ ID NO: 1318 - RNA, 38 nt, Artificial Sequence
  Definition of Artificial Sequence:  Enzymatic Nucleic Acid
  misc_feature (31)..(31): n stands for Inosine
ucuggugccugaugaggccguuaggccgaanuaggaga

SEQ ID NO: 1319 - RNA, 38 nt, Artificial Sequence
  Definition of Artificial Sequence:  Enzymatic Nucleic Acid
  misc_feature (31)..(31): n stands for Inosine
gguucuggcugaugaggccguuaggccgaancaguagg

SEQ ID NO: 1320 - RNA, 38 nt, Artificial Sequence
  Definition of Artificial Sequence:  Enzymatic Nucleic Acid
  misc_feature (31)..(31): n stands for Inosine
gcgguucucugaugaggccguuaggccgaanugcagua

SEQ ID NO: 1321 - RNA, 38 nt, Artificial Sequence
  Definition of Artificial Sequence:  Enzymatic Nucleic Acid
  misc_feature (31)..(31): n stands for Inosine
cgcgguuccugaugaggccguuaggccgaangugcagu

SEQ ID NO: 1322 - RNA, 38 nt, Artificial Sequence
  Definition of Artificial Sequence:  Enzymatic Nucleic Acid
  misc_feature (31)..(31): n stands for Inosine
ggccacgccugaugaggccguuaggccgaanuucuggu

SEQ ID NO: 1323 - RNA, 38 nt, Artificial Sequence
  Definition of Artificial Sequence:  Enzymatic Nucleic Acid
  misc_feature (31)..(31): n stands for Inosine
ugcacaugcugaugaggccguuaggccgaanccacgcg

SEQ ID NO: 1324 - RNA, 38 nt, Artificial Sequence
  Definition of Artificial Sequence:  Enzymatic Nucleic Acid
  misc_feature (31)..(31): n stands for Inosine
gugcacaucugaugaggccguuaggccgaangccacgc

SEQ ID NO: 1325 - RNA, 38 nt, Artificial Sequence
  Definition of Artificial Sequence:  Enzymatic Nucleic Acid
  misc_feature (31)..(31): n stands for Inosine
ggugcacacugaugaggccguuaggccgaanggccacg

SEQ ID NO: 1326 - RNA, 38 nt, Artificial Sequence
  Definition of Artificial Sequence:  Enzymatic Nucleic Acid
  misc_feature (31)..(31): n stands for Inosine
caugcgggcugaugaggccguuaggccgaancacaugg

SEQ ID NO: 1327 - RNA, 38 nt, Artificial Sequence
  Definition of Artificial Sequence:  Enzymatic Nucleic Acid
  misc_feature (31)..(31): n stands for Inosine
ggcaugcgcugaugaggccguuaggccgaanugcacau

SEQ ID NO: 1328 - RNA, 38 nt, Artificial Sequence
  Definition of Artificial Sequence:  Enzymatic Nucleic Acid
  misc_feature (31)..(31): n stands for Inosine
aggcaugccugaugaggccguuaggccgaangugcaca

SEQ ID NO: 1329 - RNA, 38 nt, Artificial Sequence
  Definition of Artificial Sequence:  Enzymatic Nucleic Acid
  misc_feature (31)..(31): n stands for Inosine
ggaaggcacugaugaggccguuaggccgaancgggugc

SEQ ID NO: 1330 - RNA, 38 nt, Artificial Sequence
  Definition of Artificial Sequence:  Enzymatic Nucleic Acid
  misc_feature (31)..(31): n stands for Inosine
ucacggaacugaugaggccguuaggccgaancaugcgg

SEQ ID NO: 1331 - RNA, 38 nt, Artificial Sequence
  Definition of Artificial Sequence:  Enzymatic Nucleic Acid
  misc_feature (31)..(31): n stands for Inosine
gucacggacugaugaggccguuaggccgaangcaugcg

SEQ ID NO: 1332 - RNA, 38 nt, Artificial Sequence
  Definition of Artificial Sequence:  Enzymatic Nucleic Acid
  misc_feature (31)..(31): n stands for Inosine
aaggucaccugaugaggccguuaggccgaanaaggcau

SEQ ID NO: 1333 - RNA, 38 nt, Artificial Sequence
  Definition of Artificial Sequence:  Enzymatic Nucleic Acid
  misc_feature (31)..(31): n stands for Inosine
gcggccaacugaugaggccguuaggccgaanucacgga

SEQ ID NO: 1334 - RNA, 38 nt, Artificial Sequence
  Definition of Artificial Sequence:  Enzymatic Nucleic Acid
  misc_feature (31)..(31): n stands for Inosine
ggcggccacugaugaggccguuaggccgaangucacgg

SEQ ID NO: 1335 - RNA, 38 nt, Artificial Sequence
  Definition of Artificial Sequence:  Enzymatic Nucleic Acid
  misc_feature (31)..(31): n stands for Inosine
caugaggccugaugaggccguuaggccgaanccaaggu

SEQ ID NO: 1336 - RNA, 38 nt, Artificial Sequence
  Definition of Artificial Sequence:  Enzymatic Nucleic Acid
  misc_feature (31)..(31): n stands for Inosine
ugucaugacugaugaggccguuaggccgaancggccaa

SEQ ID NO: 1337 - RNA, 38 nt, Artificial Sequence
  Definition of Artificial Sequence:  Enzymatic Nucleic Acid
  misc_feature (31)..(31): n stands for Inosine
gugucaugcugaugaggccguuaggccgaangcggcca

SEQ ID NO: 1338 - RNA, 38 nt, Artificial Sequence
  Definition of Artificial Sequence:  Enzymatic Nucleic Acid
  misc_feature (31)..(31): n stands for Inosine
gagugucacugaugaggccguuaggccgaanaggcggc

SEQ ID NO: 1339 - RNA, 38 nt, Artificial Sequence
  Definition of Artificial Sequence:  Enzymatic Nucleic Acid
  misc_feature (31)..(31): n stands for Inosine
agauagagcugaugaggccguuaggccgaanucaugag

SEQ ID NO: 1340 - RNA, 38 nt, Artificial Sequence
  Definition of Artificial Sequence:  Enzymatic Nucleic Acid
  misc_feature (31)..(31): n stands for Inosine
acagauagcugaugaggccguuaggccgaanugucaug

SEQ ID NO: 1341 - RNA, 38 nt, Artificial Sequence
  Definition of Artificial Sequence:  Enzymatic Nucleic Acid
  misc_feature (31)..(31): n stands for Inosine
aaacagaucugaugaggccguuaggccgaanaguguca

SEQ ID NO: 1342 - RNA, 38 nt, Artificial Sequence
  Definition of Artificial Sequence:  Enzymatic Nucleic Acid
  misc_feature (31)..(31): n stands for Inosine
uggcaaaccugaugaggccguuaggccgaanauagagu

SEQ ID NO: 1343 - RNA, 38 nt, Artificial Sequence
  Definition of Artificial Sequence:  Enzymatic Nucleic Acid
  misc_feature (31)..(31): n stands for Inosine
agauuguucugaugaggccguuaggccgaancaaacag

SEQ ID NO: 1344 - RNA, 38 nt, Artificial Sequence
  Definition of Artificial Sequence:  Enzymatic Nucleic Acid
  misc_feature (31)..(31): n stands for Inosine
uagauugucugaugaggccguuaggccgaangcaaaca

SEQ ID NO: 1345 - RNA, 38 nt, Artificial Sequence
  Definition of Artificial Sequence:  Enzymatic Nucleic Acid
  misc_feature (31)..(31): n stands for Inosine
ugauagaucugaugaggccguuaggccgaanuuggcaa

SEQ ID NO: 1346 - RNA, 38 nt, Artificial Sequence
  Definition of Artificial Sequence:  Enzymatic Nucleic Acid
  misc_feature (31)..(31): n stands for Inosine
gcgcugaucugaugaggccguuaggccgaanauuguug

SEQ ID NO: 1347 - RNA, 38 nt, Artificial Sequence
  Definition of Artificial Sequence:  Enzymatic Nucleic Acid
  misc_feature (31)..(31): n stands for Inosine
ggcagcgccugaugaggccguuaggccgaanauagauu

SEQ ID NO: 1348 - RNA, 38 nt, Artificial Sequence
  Definition of Artificial Sequence:  Enzymatic Nucleic Acid
  misc_feature (31)..(31): n stands for Inosine
cagugggccugaugaggccguuaggccgaancgcugau

SEQ ID NO: 1349 - RNA, 38 nt, Artificial Sequence
  Definition of Artificial Sequence:  Enzymatic Nucleic Acid
  misc_feature (31)..(31): n stands for Inosine
ccucagugcugaugaggccguuaggccgaancagcgcu

SEQ ID NO: 1350 - RNA, 38 nt, Artificial Sequence
  Definition of Artificial Sequence:  Enzymatic Nucleic Acid
  misc_feature (31)..(31): n stands for Inosine
gccucagucugaugaggccguuaggccgaangcagcgc

SEQ ID NO: 1351 - RNA, 38 nt, Artificial Sequence
  Definition of Artificial Sequence:  Enzymatic Nucleic Acid
  misc_feature (31)..(31): n stands for Inosine
ggccucagcugaugaggccguuaggccgaanggcagcg

SEQ ID NO: 1352 - RNA, 38 nt, Artificial Sequence
  Definition of Artificial Sequence:  Enzymatic Nucleic Acid
  misc_feature (31)..(31): n stands for Inosine
agggccuccugaugaggccguuaggccgaanugggcag

SEQ ID NO: 1353 - RNA, 38 nt, Artificial Sequence
  Definition of Artificial Sequence:  Enzymatic Nucleic Acid
  misc_feature (31)..(31): n stands for Inosine
ggggccagcugaugaggccguuaggccgaanccucagu

SEQ ID NO: 1354 - RNA, 38 nt, Artificial Sequence
  Definition of Artificial Sequence:  Enzymatic Nucleic Acid
  misc_feature (31)..(31): n stands for Inosine
gggggccacugaugaggccguuaggccgaangccucag

SEQ ID NO: 1355 - RNA, 38 nt, Artificial Sequence
  Definition of Artificial Sequence:  Enzymatic Nucleic Acid
  misc_feature (31)..(31): n stands for Inosine
ggggggcccugaugaggccguuaggccgaanggccuca

SEQ ID NO: 1356 - RNA, 38 nt, Artificial Sequence
  Definition of Artificial Sequence:  Enzymatic Nucleic Acid
  misc_feature (31)..(31): n stands for Inosine
cgcaggggcugaugaggccguuaggccgaanccagggc

SEQ ID NO: 1357 - RNA, 38 nt, Artificial Sequence
  Definition of Artificial Sequence:  Enzymatic Nucleic Acid
  misc_feature (31)..(31): n stands for Inosine
acgcagggcugaugaggccguuaggccgaangccaggg

SEQ ID NO: 1358 - RNA, 38 nt, Artificial Sequence
  Definition of Artificial Sequence:  Enzymatic Nucleic Acid
  misc_feature (31)..(31): n stands for Inosine
cacgcaggcugaugaggccguuaggccgaanggccagg

SEQ ID NO: 1359 - RNA, 38 nt, Artificial Sequence
  Definition of Artificial Sequence:  Enzymatic Nucleic Acid
  misc_feature (31)..(31): n stands for Inosine
gcacgcagcugaugaggccguuaggccgaangggccag

SEQ ID NO: 1360 - RNA, 38 nt, Artificial Sequence
  Definition of Artificial Sequence:  Enzymatic Nucleic Acid
  misc_feature (31)..(31): n stands for Inosine
ggcacgcacugaugaggccguuaggccgaanggggcca

SEQ ID NO: 1361 - RNA, 38 nt, Artificial Sequence
  Definition of Artificial Sequence:  Enzymatic Nucleic Acid
  misc_feature (31)..(31): n stands for Inosine
gggcacgccugaugaggccguuaggccgaangggggcc

SEQ ID NO: 1362 - RNA, 38 nt, Artificial Sequence
  Definition of Artificial Sequence:  Enzymatic Nucleic Acid
  misc_feature (31)..(31): n stands for Inosine
uacugcagcugaugaggccguuaggccgaancacgcag

SEQ ID NO: 1363 - RNA, 38 nt, Artificial Sequence
  Definition of Artificial Sequence:  Enzymatic Nucleic Acid
  misc_feature (31)..(31): n stands for Inosine
guacugcacugaugaggccguuaggccgaangcacgca

SEQ ID NO: 1364 - RNA, 38 nt, Artificial Sequence
  Definition of Artificial Sequence:  Enzymatic Nucleic Acid
  misc_feature (31)..(31): n stands for Inosine
gguacugccugaugaggccguuaggccgaanggcacgc

SEQ ID NO: 1365 - RNA, 38 nt, Artificial Sequence
  Definition of Artificial Sequence:  Enzymatic Nucleic Acid
  misc_feature (31)..(31): n stands for Inosine
ucagguaccugaugaggccguuaggccgaancagggca

SEQ ID NO: 1366 - RNA, 38 nt, Artificial Sequence
  Definition of Artificial Sequence:  Enzymatic Nucleic Acid
  misc_feature (31)..(31): n stands for Inosine
gagccucacugaugaggccguuaggccgaanuacugca

SEQ ID NO: 1367 - RNA, 38 nt, Artificial Sequence
  Definition of Artificial Sequence:  Enzymatic Nucleic Acid
  misc_feature (31)..(31): n stands for Inosine
ugagccuccugaugaggccguuaggccgaanguacugc

SEQ ID NO: 1368 - RNA, 38 nt, Artificial Sequence
  Definition of Artificial Sequence:  Enzymatic Nucleic Acid
  misc_feature (31)..(31): n stands for Inosine
ugucguugcugaugaggccguuaggccgaanccucagg

SEQ ID NO: 1369 - RNA, 38 nt, Artificial Sequence
  Definition of Artificial Sequence:  Enzymatic Nucleic Acid
  misc_feature (31)..(31): n stands for Inosine
guugucgucugaugaggccguuaggccgaanagccuca

SEQ ID NO: 1370 - RNA, 38 nt, Artificial Sequence
  Definition of Artificial Sequence:  Enzymatic Nucleic Acid
  misc_feature (31)..(31): n stands for Inosine
ccaggggucugaugaggccguuaggccgaanucguuga

SEQ ID NO: 1371 - RNA, 38 nt, Artificial Sequence
  Definition of Artificial Sequence:  Enzymatic Nucleic Acid
  misc_feature (31)..(31): n stands for Inosine
cacccaggcugaugaggccguuaggccgaanuugucgu

SEQ ID NO: 1372 - RNA, 38 nt, Artificial Sequence
  Definition of Artificial Sequence:  Enzymatic Nucleic Acid
  misc_feature (31)..(31): n stands for Inosine
acacccagcugaugaggccguuaggccgaanguugucg

SEQ ID NO: 1373 - RNA, 38 nt, Artificial Sequence
  Definition of Artificial Sequence:  Enzymatic Nucleic Acid
  misc_feature (31)..(31): n stands for Inosine
cacacccacugaugaggccguuaggccgaangguuguc

SEQ ID NO: 1374 - RNA, 38 nt, Artificial Sequence
  Definition of Artificial Sequence:  Enzymatic Nucleic Acid
  misc_feature (31)..(31): n stands for Inosine
acacaccccugaugaggccguuaggccgaanggguugu

SEQ ID NO: 1375 - RNA, 38 nt, Artificial Sequence
  Definition of Artificial Sequence:  Enzymatic Nucleic Acid
  misc_feature (31)..(31): n stands for Inosine
ugcccggccugaugaggccguuaggccgaanucacaca

SEQ ID NO: 1376 - RNA, 38 nt, Artificial Sequence
  Definition of Artificial Sequence:  Enzymatic Nucleic Acid
  misc_feature (31)..(31): n stands for Inosine
gcgugccccugaugaggccguuaggccgaancagucac

SEQ ID NO: 1377 - RNA, 38 nt, Artificial Sequence
  Definition of Artificial Sequence:  Enzymatic Nucleic Acid
  misc_feature (31)..(31): n stands for Inosine
agugggcgcugaugaggccguuaggccgaancccggca

SEQ ID NO: 1378 - RNA, 38 nt, Artificial Sequence
  Definition of Artificial Sequence:  Enzymatic Nucleic Acid
  misc_feature (31)..(31): n stands for Inosine
ccagagugcugaugaggccguuaggccgaancgugccc

SEQ ID NO: 1379 - RNA, 38 nt, Artificial Sequence
  Definition of Artificial Sequence:  Enzymatic Nucleic Acid
  misc_feature (31)..(31): n stands for Inosine
cccagagucugaugaggccguuaggccgaangcgugcc

SEQ ID NO: 1380 - RNA, 38 nt, Artificial Sequence
  Definition of Artificial Sequence:  Enzymatic Nucleic Acid
  misc_feature (31)..(31): n stands for Inosine
gcccagagcugaugaggccguuaggccgaanggcgugc

SEQ ID NO: 1381 - RNA, 38 nt, Artificial Sequence
  Definition of Artificial Sequence:  Enzymatic Nucleic Acid
  misc_feature (31)..(31): n stands for Inosine
aggcccagcugaugaggccguuaggccgaanugggcgu

SEQ ID NO: 1382 - RNA, 38 nt, Artificial Sequence
  Definition of Artificial Sequence:  Enzymatic Nucleic Acid
  misc_feature (31)..(31): n stands for Inosine
ccaggccccugaugaggccguuaggccgaanagugggc

SEQ ID NO: 1383 - RNA, 38 nt, Artificial Sequence
  Definition of Artificial Sequence:  Enzymatic Nucleic Acid
  misc_feature (31)..(31): n stands for Inosine
ugcagccacugaugaggccguuaggccgaancccagag

SEQ ID NO: 1384 - RNA, 38 nt, Artificial Sequence
  Definition of Artificial Sequence:  Enzymatic Nucleic Acid
  misc_feature (31)..(31): n stands for Inosine
cugcagcccugaugaggccguuaggccgaangcccaga

SEQ ID NO: 1385 - RNA, 38 nt, Artificial Sequence
  Definition of Artificial Sequence:  Enzymatic Nucleic Acid
  misc_feature (31)..(31): n stands for Inosine
acuucugccugaugaggccguuaggccgaanccaggcc

SEQ ID NO: 1386 - RNA, 38 nt, Artificial Sequence
  Definition of Artificial Sequence:  Enzymatic Nucleic Acid
  misc_feature (31)..(31): n stands for Inosine
ggaacuuccugaugaggccguuaggccgaancagccag

SEQ ID NO: 1387 - RNA, 38 nt, Artificial Sequence
  Definition of Artificial Sequence:  Enzymatic Nucleic Acid
  misc_feature (31)..(31): n stands for Inosine
ggagccgccugaugaggccguuaggccgaanaacuucu

SEQ ID NO: 1388 - RNA, 38 nt, Artificial Sequence
  Definition of Artificial Sequence:  Enzymatic Nucleic Acid
  misc_feature (31)..(31): n stands for Inosine
ggaggaggcugaugaggccguuaggccgaanccgcgga

SEQ ID NO: 1389 - RNA, 38 nt, Artificial Sequence
  Definition of Artificial Sequence:  Enzymatic Nucleic Acid
  misc_feature (31)..(31): n stands for Inosine
ucggaggacugaugaggccguuaggccgaanagccgcg

SEQ ID NO: 1390 - RNA, 38 nt, Artificial Sequence
  Definition of Artificial Sequence:  Enzymatic Nucleic Acid
  misc_feature (31)..(31): n stands for Inosine
cucggaggcugaugaggccguuaggccgaangagccgc

SEQ ID NO: 1391 - RNA, 38 nt, Artificial Sequence
  Definition of Artificial Sequence:  Enzymatic Nucleic Acid
  misc_feature (31)..(31): n stands for Inosine
accucggacugaugaggccguuaggccgaanaggagcc

SEQ ID NO: 1392 - RNA, 38 nt, Artificial Sequence
  Definition of Artificial Sequence:  Enzymatic Nucleic Acid
  misc_feature (31)..(31): n stands for Inosine
caccucggcugaugaggccguuaggccgaangaggagc

SEQ ID NO: 1393 - RNA, 38 nt, Artificial Sequence
  Definition of Artificial Sequence:  Enzymatic Nucleic Acid
  misc_feature (31)..(31): n stands for Inosine
ggcaccuccugaugaggccguuaggccgaanaggagga

SEQ ID NO: 1394 - RNA, 38 nt, Artificial Sequence
  Definition of Artificial Sequence:  Enzymatic Nucleic Acid
  misc_feature (31)..(31): n stands for Inosine
ggcugcagcugaugaggccguuaggccgaancaccucg

SEQ ID NO: 1395 - RNA, 38 nt, Artificial Sequence
  Definition of Artificial Sequence:  Enzymatic Nucleic Acid
  misc_feature (31)..(31): n stands for Inosine
aggcugcacugaugaggccguuaggccgaangcaccuc

SEQ ID NO: 1396 - RNA, 38 nt, Artificial Sequence
  Definition of Artificial Sequence:  Enzymatic Nucleic Acid
  misc_feature (31)..(31): n stands for Inosine
gaggcugccugaugaggccguuaggccgaanggcaccu

SEQ ID NO: 1397 - RNA, 38 nt, Artificial Sequence
  Definition of Artificial Sequence:  Enzymatic Nucleic Acid
  misc_feature (31)..(31): n stands for Inosine
cgggaggccugaugaggccguuaggccgaancagggca

SEQ ID NO: 1398 - RNA, 38 nt, Artificial Sequence
  Definition of Artificial Sequence:  Enzymatic Nucleic Acid
  misc_feature (31)..(31): n stands for Inosine
uugcgggacugaugaggccguuaggccgaancugcagg

SEQ ID NO: 1399 - RNA, 38 nt, Artificial Sequence
  Definition of Artificial Sequence:  Enzymatic Nucleic Acid
  misc_feature (31)..(31): n stands for Inosine
guugcgggcugaugaggccguuaggccgaangcugcag

SEQ ID NO: 1400 - RNA, 38 nt, Artificial Sequence
  Definition of Artificial Sequence:  Enzymatic Nucleic Acid
  misc_feature (31)..(31): n stands for Inosine
gcguugcgcugaugaggccguuaggccgaanaggcugc

SEQ ID NO: 1401 - RNA, 38 nt, Artificial Sequence
  Definition of Artificial Sequence:  Enzymatic Nucleic Acid
  misc_feature (31)..(31): n stands for Inosine
ggcguugccugaugaggccguuaggccgaangaggcug

SEQ ID NO: 1402 - RNA, 38 nt, Artificial Sequence
  Definition of Artificial Sequence:  Enzymatic Nucleic Acid
  misc_feature (31)..(31): n stands for Inosine
ccaggcgucugaugaggccguuaggccgaancgggagg

SEQ ID NO: 1403 - RNA, 38 nt, Artificial Sequence
  Definition of Artificial Sequence:  Enzymatic Nucleic Acid
  misc_feature (31)..(31): n stands for Inosine
gccagccacugaugaggccguuaggccgaancguugcg

SEQ ID NO: 1404 - RNA, 38 nt, Artificial Sequence
  Definition of Artificial Sequence:  Enzymatic Nucleic Acid
  misc_feature (31)..(31): n stands for Inosine
ggccagcccugaugaggccguuaggccgaangcguugc

SEQ ID NO: 1405 - RNA, 38 nt, Artificial Sequence
  Definition of Artificial Sequence:  Enzymatic Nucleic Acid
  misc_feature (31)..(31): n stands for Inosine
ucacggcccugaugaggccguuaggccgaanccaggcg

SEQ ID NO: 1406 - RNA, 38 nt, Artificial Sequence
  Definition of Artificial Sequence:  Enzymatic Nucleic Acid
  misc_feature (31)..(31): n stands for Inosine
gaggucaccugaugaggccguuaggccgaanccagcca

SEQ ID NO: 1407 - RNA, 38 nt, Artificial Sequence
  Definition of Artificial Sequence:  Enzymatic Nucleic Acid
  misc_feature (31)..(31): n stands for Inosine
gcguuugacugaugaggccguuaggccgaanucacggc

SEQ ID NO: 1408 - RNA, 38 nt, Artificial Sequence
  Definition of Artificial Sequence:  Enzymatic Nucleic Acid
  misc_feature (31)..(31): n stands for Inosine
ggcguuugcugaugaggccguuaggccgaangucacgg

SEQ ID NO: 1409 - RNA, 38 nt, Artificial Sequence
  Definition of Artificial Sequence:  Enzymatic Nucleic Acid
  misc_feature (31)..(31): n stands for Inosine
uaggcguucugaugaggccguuaggccgaanaggucac

SEQ ID NO: 1410 - RNA, 38 nt, Artificial Sequence
  Definition of Artificial Sequence:  Enzymatic Nucleic Acid
  misc_feature (31)..(31): n stands for Inosine
ggcagcuacugaugaggccguuaggccgaancguuuga

SEQ ID NO: 1411 - RNA, 38 nt, Artificial Sequence
  Definition of Artificial Sequence:  Enzymatic Nucleic Acid
  misc_feature (31)..(31): n stands for Inosine
uggcagcucugaugaggccguuaggccgaangcguuug

SEQ ID NO: 1412 - RNA, 38 nt, Artificial Sequence
  Definition of Artificial Sequence:  Enzymatic Nucleic Acid
  misc_feature (31)..(31): n stands for Inosine
ucauuggccugaugaggccguuaggccgaancuaggcg

SEQ ID NO: 1413 - RNA, 38 nt, Artificial Sequence
  Definition of Artificial Sequence:  Enzymatic Nucleic Acid
  misc_feature (31)..(31): n stands for Inosine
aggucauucugaugaggccguuaggccgaancagcuag

SEQ ID NO: 1414 - RNA, 38 nt, Artificial Sequence
  Definition of Artificial Sequence:  Enzymatic Nucleic Acid
  misc_feature (31)..(31): n stands for Inosine
caggucaucugaugaggccguuaggccgaangcagcua

SEQ ID NO: 1415 - RNA, 38 nt, Artificial Sequence
  Definition of Artificial Sequence:  Enzymatic Nucleic Acid
  misc_feature (31)..(31): n stands for Inosine
gcccugcacugaugaggccguuaggccgaanucauugg

SEQ ID NO: 1416 - RNA, 38 nt, Artificial Sequence
  Definition of Artificial Sequence:  Enzymatic Nucleic Acid
  misc_feature (31)..(31): n stands for Inosine
agcccugccugaugaggccguuaggccgaangucauug

SEQ ID NO: 1417 - RNA, 38 nt, Artificial Sequence
  Definition of Artificial Sequence:  Enzymatic Nucleic Acid
  misc_feature (31)..(31): n stands for Inosine
cgcagccccugaugaggccguuaggccgaancagguca

SEQ ID NO: 1418 - RNA, 38 nt, Artificial Sequence
  Definition of Artificial Sequence:  Enzymatic Nucleic Acid
  misc_feature (31)..(31): n stands for Inosine
cacagcgccugaugaggccguuaggccgaancccugca

SEQ ID NO: 1419 - RNA, 38 nt, Artificial Sequence
  Definition of Artificial Sequence:  Enzymatic Nucleic Acid
  misc_feature (31)..(31): n stands for Inosine
guggccaccugaugaggccguuaggccgaancgcagcc

SEQ ID NO: 1420 - RNA, 38 nt, Artificial Sequence
  Definition of Artificial Sequence:  Enzymatic Nucleic Acid
  misc_feature (31)..(31): n stands for Inosine
gggccggucugaugaggccguuaggccgaanccacagc

SEQ ID NO: 1421 - RNA, 38 nt, Artificial Sequence
  Definition of Artificial Sequence:  Enzymatic Nucleic Acid
  misc_feature (31)..(31): n stands for Inosine
agggccggcugaugaggccguuaggccgaangccacag

SEQ ID NO: 1422 - RNA, 38 nt, Artificial Sequence
  Definition of Artificial Sequence:  Enzymatic Nucleic Acid
  misc_feature (31)..(31): n stands for Inosine
uaagggcccugaugaggccguuaggccgaanuggccac

SEQ ID NO: 1423 - RNA, 38 nt, Artificial Sequence
  Definition of Artificial Sequence:  Enzymatic Nucleic Acid
  misc_feature (31)..(31): n stands for Inosine
augguaagcugaugaggccguuaggccgaanccggugg

SEQ ID NO: 1424 - RNA, 38 nt, Artificial Sequence
  Definition of Artificial Sequence:  Enzymatic Nucleic Acid
  misc_feature (31)..(31): n stands for Inosine
gaugguaacugaugaggccguuaggccgaangccggug

SEQ ID NO: 1425 - RNA, 38 nt, Artificial Sequence
  Definition of Artificial Sequence:  Enzymatic Nucleic Acid
  misc_feature (31)..(31): n stands for Inosine
ggaugguacugaugaggccguuaggccgaanggccggu

SEQ ID NO: 1426 - RNA, 38 nt, Artificial Sequence
  Definition of Artificial Sequence:  Enzymatic Nucleic Acid
  misc_feature (31)..(31): n stands for Inosine
gaugggaucugaugaggccguuaggccgaanuaagggc

SEQ ID NO: 1427 - RNA, 38 nt, Artificial Sequence
  Definition of Artificial Sequence:  Enzymatic Nucleic Acid
  misc_feature (31)..(31): n stands for Inosine
agaugggacugaugaggccguuaggccgaanguaaggg

SEQ ID NO: 1428 - RNA, 38 nt, Artificial Sequence
  Definition of Artificial Sequence:  Enzymatic Nucleic Acid
  misc_feature (31)..(31): n stands for Inosine
uccagaugcugaugaggccguuaggccgaanaugguaa

SEQ ID NO: 1429 - RNA, 38 nt, Artificial Sequence
  Definition of Artificial Sequence:  Enzymatic Nucleic Acid
  misc_feature (31)..(31): n stands for Inosine
guccagaucugaugaggccguuaggccgaangauggua

SEQ ID NO: 1430 - RNA, 38 nt, Artificial Sequence
  Definition of Artificial Sequence:  Enzymatic Nucleic Acid
  misc_feature (31)..(31): n stands for Inosine
gguccagacugaugaggccguuaggccgaanggauggu

SEQ ID NO: 1431 - RNA, 38 nt, Artificial Sequence
  Definition of Artificial Sequence:  Enzymatic Nucleic Acid
  misc_feature (31)..(31): n stands for Inosine
gccggucccugaugaggccguuaggccgaanaugggau

SEQ ID NO: 1432 - RNA, 38 nt, Artificial Sequence
  Definition of Artificial Sequence:  Enzymatic Nucleic Acid
  misc_feature (31)..(31): n stands for Inosine
gcccugcccugaugaggccguuaggccgaanuccagau

SEQ ID NO: 1433 - RNA, 38 nt, Artificial Sequence
  Definition of Artificial Sequence:  Enzymatic Nucleic Acid
  misc_feature (31)..(31): n stands for Inosine
gguggccccugaugaggccguuaggccgaanccggucc

SEQ ID NO: 1434 - RNA, 38 nt, Artificial Sequence
  Definition of Artificial Sequence:  Enzymatic Nucleic Acid
  misc_feature (31)..(31): n stands for Inosine
ucaucggucugaugaggccguuaggccgaancccugcc

SEQ ID NO: 1435 - RNA, 38 nt, Artificial Sequence
  Definition of Artificial Sequence:  Enzymatic Nucleic Acid
  misc_feature (31)..(31): n stands for Inosine
cucaucggcugaugaggccguuaggccgaangcccugc

SEQ ID NO: 1436 - RNA, 38 nt, Artificial Sequence
  Definition of Artificial Sequence:  Enzymatic Nucleic Acid
  misc_feature (31)..(31): n stands for Inosine
uccucauccugaugaggccguuaggccgaanuggcccu

SEQ ID NO: 1437 - RNA, 38 nt, Artificial Sequence
  Definition of Artificial Sequence:  Enzymatic Nucleic Acid
  misc_feature (31)..(31): n stands for Inosine
gccccagccugaugaggccguuaggccgaancuccuca

SEQ ID NO: 1438 - RNA, 38 nt, Artificial Sequence
  Definition of Artificial Sequence:  Enzymatic Nucleic Acid
  misc_feature (31)..(31): n stands for Inosine
gaagcccccugaugaggccguuaggccgaancggcucc

SEQ ID NO: 1439 - RNA, 38 nt, Artificial Sequence
  Definition of Artificial Sequence:  Enzymatic Nucleic Acid
  misc_feature (31)..(31): n stands for Inosine
acuugggacugaugaggccguuaggccgaanccccagc

SEQ ID NO: 1440 - RNA, 38 nt, Artificial Sequence
  Definition of Artificial Sequence:  Enzymatic Nucleic Acid
  misc_feature (31)..(31): n stands for Inosine
agcacuugcugaugaggccguuaggccgaanaagcccc

SEQ ID NO: 1441 - RNA, 38 nt, Artificial Sequence
  Definition of Artificial Sequence:  Enzymatic Nucleic Acid
  misc_feature (31)..(31): n stands for Inosine
cagcacuucugaugaggccguuaggccgaangaagccc

SEQ ID NO: 1442 - RNA, 38 nt, Artificial Sequence
  Definition of Artificial Sequence:  Enzymatic Nucleic Acid
  misc_feature (31)..(31): n stands for Inosine
gcagcacucugaugaggccguuaggccgaanggaagcc

SEQ ID NO: 1443 - RNA, 38 nt, Artificial Sequence
  Definition of Artificial Sequence:  Enzymatic Nucleic Acid
  misc_feature (31)..(31): n stands for Inosine
uggcuggccugaugaggccguuaggccgaancacuugg

SEQ ID NO: 1444 - RNA, 38 nt, Artificial Sequence
  Definition of Artificial Sequence:  Enzymatic Nucleic Acid
  misc_feature (31)..(31): n stands for Inosine
aucuggcucugaugaggccguuaggccgaancagcacu

SEQ ID NO: 1445 - RNA, 38 nt, Artificial Sequence
  Definition of Artificial Sequence:  Enzymatic Nucleic Acid
  misc_feature (31)..(31): n stands for Inosine
caucuggccugaugaggccguuaggccgaangcagcac

SEQ ID NO: 1446 - RNA, 38 nt, Artificial Sequence
  Definition of Artificial Sequence:  Enzymatic Nucleic Acid
  misc_feature (31)..(31): n stands for Inosine
cggcaucucugaugaggccguuaggccgaancuggcag

SEQ ID NO: 1447 - RNA, 38 nt, Artificial Sequence
  Definition of Artificial Sequence:  Enzymatic Nucleic Acid
  misc_feature (31)..(31): n stands for Inosine
gcggcauccugaugaggccguuaggccgaangcuggca

SEQ ID NO: 1448 - RNA, 38 nt, Artificial Sequence
  Definition of Artificial Sequence:  Enzymatic Nucleic Acid
  misc_feature (31)..(31): n stands for Inosine
uugucagccugaugaggccguuaggccgaancaucugg

SEQ ID NO: 1449 - RNA, 38 nt, Artificial Sequence
  Definition of Artificial Sequence:  Enzymatic Nucleic Acid
  misc_feature (31)..(31): n stands for Inosine
gccuuguccugaugaggccguuaggccgaancggcauc

SEQ ID NO: 1450 - RNA, 38 nt, Artificial Sequence
  Definition of Artificial Sequence:  Enzymatic Nucleic Acid
  misc_feature (31)..(31): n stands for Inosine
ugaggccucugaugaggccguuaggccgaanucagcgg

SEQ ID NO: 1451 - RNA, 38 nt, Artificial Sequence
  Definition of Artificial Sequence:  Enzymatic Nucleic Acid
  misc_feature (31)..(31): n stands for Inosine
aguacugacugaugaggccguuaggccgaanccuuguc

SEQ ID NO: 1452 - RNA, 38 nt, Artificial Sequence
  Definition of Artificial Sequence:  Enzymatic Nucleic Acid
  misc_feature (31)..(31): n stands for Inosine
caguacugcugaugaggccguuaggccgaangccuugu

SEQ ID NO: 1453 - RNA, 38 nt, Artificial Sequence
  Definition of Artificial Sequence:  Enzymatic Nucleic Acid
  misc_feature (31)..(31): n stands for Inosine
uccaguaccugaugaggccguuaggccgaanaggccuu

SEQ ID NO: 1454 - RNA, 38 nt, Artificial Sequence
  Definition of Artificial Sequence:  Enzymatic Nucleic Acid
  misc_feature (31)..(31): n stands for Inosine
caggcucccugaugaggccguuaggccgaanuacugag

SEQ ID NO: 1455 - RNA, 38 nt, Artificial Sequence
  Definition of Artificial Sequence:  Enzymatic Nucleic Acid
  misc_feature (31)..(31): n stands for Inosine
gucuuccacugaugaggccguuaggccgaancuccagu

SEQ ID NO: 1456 - RNA, 38 nt, Artificial Sequence
  Definition of Artificial Sequence:  Enzymatic Nucleic Acid
  misc_feature (31)..(31): n stands for Inosine
ggucuucccugaugaggccguuaggccgaangcuccag

SEQ ID NO: 1457 - RNA, 38 nt, Artificial Sequence
  Definition of Artificial Sequence:  Enzymatic Nucleic Acid
  misc_feature (31)..(31): n stands for Inosine
ccgaagcucugaugaggccguuaggccgaanucuucca

SEQ ID NO: 1458 - RNA, 38 nt, Artificial Sequence
  Definition of Artificial Sequence:  Enzymatic Nucleic Acid
  misc_feature (31)..(31): n stands for Inosine
gccgaagccugaugaggccguuaggccgaangucuucc

SEQ ID NO: 1459 - RNA, 38 nt, Artificial Sequence
  Definition of Artificial Sequence:  Enzymatic Nucleic Acid
  misc_feature (31)..(31): n stands for Inosine
ccugccgacugaugaggccguuaggccgaancuggucu

SEQ ID NO: 1460 - RNA, 38 nt, Artificial Sequence
  Definition of Artificial Sequence:  Enzymatic Nucleic Acid
  misc_feature (31)..(31): n stands for Inosine
gcauugcccugaugaggccguuaggccgaanccgaagc

SEQ ID NO: 1461 - RNA, 38 nt, Artificial Sequence
  Definition of Artificial Sequence:  Enzymatic Nucleic Acid
  misc_feature (31)..(31): n stands for Inosine
cagcgcaucugaugaggccguuaggccgaanccugccg

SEQ ID NO: 1462 - RNA, 38 nt, Artificial Sequence
  Definition of Artificial Sequence:  Enzymatic Nucleic Acid
  misc_feature (31)..(31): n stands for Inosine
gucccuuccugaugaggccguuaggccgaancgcauug

SEQ ID NO: 1463 - RNA, 38 nt, Artificial Sequence
  Definition of Artificial Sequence:  Enzymatic Nucleic Acid
  misc_feature (31)..(31): n stands for Inosine
caccgggccugaugaggccguuaggccgaancacgcgu

SEQ ID NO: 1464 - RNA, 38 nt, Artificial Sequence
  Definition of Artificial Sequence:  Enzymatic Nucleic Acid
  misc_feature (31)..(31): n stands for Inosine
ugucaccgcugaugaggccguuaggccgaancggcacg

SEQ ID NO: 1465 - RNA, 38 nt, Artificial Sequence
  Definition of Artificial Sequence:  Enzymatic Nucleic Acid
  misc_feature (31)..(31): n stands for Inosine
cugucacccugaugaggccguuaggccgaangcggcac

SEQ ID NO: 1466 - RNA, 38 nt, Artificial Sequence
  Definition of Artificial Sequence:  Enzymatic Nucleic Acid
  misc_feature (31)..(31): n stands for Inosine
cggcgggccugaugaggccguuaggccgaanucaccgg

SEQ ID NO: 1467 - RNA, 38 nt, Artificial Sequence
  Definition of Artificial Sequence:  Enzymatic Nucleic Acid
  misc_feature (31)..(31): n stands for Inosine
gcccggcgcugaugaggccguuaggccgaancugucac

SEQ ID NO: 1468 - RNA, 38 nt, Artificial Sequence
  Definition of Artificial Sequence:  Enzymatic Nucleic Acid
  misc_feature (31)..(31): n stands for Inosine
ugcccggccugaugaggccguuaggccgaangcuguca

SEQ ID NO: 1469 - RNA, 38 nt, Artificial Sequence
  Definition of Artificial Sequence:  Enzymatic Nucleic Acid
  misc_feature (31)..(31): n stands for Inosine
cguugccccugaugaggccguuaggccgaancgggcug

SEQ ID NO: 1470 - RNA, 38 nt, Artificial Sequence
  Definition of Artificial Sequence:  Enzymatic Nucleic Acid
  misc_feature (31)..(31): n stands for Inosine
agagccgucugaugaggccguuaggccgaancccggcg

SEQ ID NO: 1471 - RNA, 38 nt, Artificial Sequence
  Definition of Artificial Sequence:  Enzymatic Nucleic Acid
  misc_feature (31)..(31): n stands for Inosine
ugggccagcugaugaggccguuaggccgaanccguugc

SEQ ID NO: 1472 - RNA, 38 nt, Artificial Sequence
  Definition of Artificial Sequence:  Enzymatic Nucleic Acid
  misc_feature (31)..(31): n stands for Inosine
cgugggcccugaugaggccguuaggccgaanagccguu

SEQ ID NO: 1473 - RNA, 38 nt, Artificial Sequence
  Definition of Artificial Sequence:  Enzymatic Nucleic Acid
  misc_feature (31)..(31): n stands for Inosine
gugccgugcugaugaggccguuaggccgaanccagagc

SEQ ID NO: 1474 - RNA, 38 nt, Artificial Sequence
  Definition of Artificial Sequence:  Enzymatic Nucleic Acid
  misc_feature (31)..(31): n stands for Inosine
ugugccgucugaugaggccguuaggccgaangccagag

SEQ ID NO: 1475 - RNA, 38 nt, Artificial Sequence
  Definition of Artificial Sequence:  Enzymatic Nucleic Acid
  misc_feature (31)..(31): n stands for Inosine
augugccgcugaugaggccguuaggccgaanggccaga

SEQ ID NO: 1476 - RNA, 38 nt, Artificial Sequence
  Definition of Artificial Sequence:  Enzymatic Nucleic Acid
  misc_feature (31)..(31): n stands for Inosine
cauugaugcugaugaggccguuaggccgaanccguggg

SEQ ID NO: 1477 - RNA, 38 nt, Artificial Sequence
  Definition of Artificial Sequence:  Enzymatic Nucleic Acid
  misc_feature (31)..(31): n stands for Inosine
gucauugacugaugaggccguuaggccgaanugccgug

SEQ ID NO: 1478 - RNA, 38 nt, Artificial Sequence
  Definition of Artificial Sequence:  Enzymatic Nucleic Acid
  misc_feature (31)..(31): n stands for Inosine
ugagucaucugaugaggccguuaggccgaanaugugcc

SEQ ID NO: 1479 - RNA, 38 nt, Artificial Sequence
  Definition of Artificial Sequence:  Enzymatic Nucleic Acid
  misc_feature (31)..(31): n stands for Inosine
aaagggugcugaugaggccguuaggccgaanucauuga

SEQ ID NO: 1480 - RNA, 38 nt, Artificial Sequence
  Definition of Artificial Sequence:  Enzymatic Nucleic Acid
  misc_feature (31)..(31): n stands for Inosine
ccaaagggcugaugaggccguuaggccgaanagucauu

SEQ ID NO: 1481 - RNA, 38 nt, Artificial Sequence
  Definition of Artificial Sequence:  Enzymatic Nucleic Acid
  misc_feature (31)..(31): n stands for Inosine
ucccaaagcugaugaggccguuaggccgaanugaguca

SEQ ID NO: 1482 - RNA, 38 nt, Artificial Sequence
  Definition of Artificial Sequence:  Enzymatic Nucleic Acid
  misc_feature (31)..(31): n stands for Inosine
gucccaaacugaugaggccguuaggccgaangugaguc

SEQ ID NO: 1483 - RNA, 38 nt, Artificial Sequence
  Definition of Artificial Sequence:  Enzymatic Nucleic Acid
  misc_feature (31)..(31): n stands for Inosine
agucccaacugaugaggccguuaggccgaanggugagu

SEQ ID NO: 1484 - RNA, 38 nt, Artificial Sequence
  Definition of Artificial Sequence:  Enzymatic Nucleic Acid
  misc_feature (31)..(31): n stands for Inosine
ccaggcagcugaugaggccguuaggccgaanucccaaa

SEQ ID NO: 1485 - RNA, 38 nt, Artificial Sequence
  Definition of Artificial Sequence:  Enzymatic Nucleic Acid
  misc_feature (31)..(31): n stands for Inosine
agccaggccugaugaggccguuaggccgaanaguccca

SEQ ID NO: 1486 - RNA, 38 nt, Artificial Sequence
  Definition of Artificial Sequence:  Enzymatic Nucleic Acid
  misc_feature (31)..(31): n stands for Inosine
cagagccacugaugaggccguuaggccgaancagaguc

SEQ ID NO: 1487 - RNA, 38 nt, Artificial Sequence
  Definition of Artificial Sequence:  Enzymatic Nucleic Acid
  misc_feature (31)..(31): n stands for Inosine
gcagagcccugaugaggccguuaggccgaangcagagu

SEQ ID NO: 1488 - RNA, 38 nt, Artificial Sequence
  Definition of Artificial Sequence:  Enzymatic Nucleic Acid
  misc_feature (31)..(31): n stands for Inosine
cucagcagcugaugaggccguuaggccgaanccaggca

SEQ ID NO: 1489 - RNA, 38 nt, Artificial Sequence
  Definition of Artificial Sequence:  Enzymatic Nucleic Acid
  misc_feature (31)..(31): n stands for Inosine
ggcucagccugaugaggccguuaggccgaanagccagg

SEQ ID NO: 1490 - RNA, 38 nt, Artificial Sequence
  Definition of Artificial Sequence:  Enzymatic Nucleic Acid
  misc_feature (31)..(31): n stands for Inosine
gggggcuccugaugaggccguuaggccgaancagagcc

SEQ ID NO: 1491 - RNA, 38 nt, Artificial Sequence
  Definition of Artificial Sequence:  Enzymatic Nucleic Acid
  misc_feature (31)..(31): n stands for Inosine
ugagcgggcugaugaggccguuaggccgaancucagca

SEQ ID NO: 1492 - RNA, 38 nt, Artificial Sequence
  Definition of Artificial Sequence:  Enzymatic Nucleic Acid
  misc_feature (31)..(31): n stands for Inosine
gugagcggcugaugaggccguuaggccgaangcucagc

SEQ ID NO: 1493 - RNA, 38 nt, Artificial Sequence
  Definition of Artificial Sequence:  Enzymatic Nucleic Acid
  misc_feature (31)..(31): n stands for Inosine
agugagcgcugaugaggccguuaggccgaanggcucag

SEQ ID NO: 1494 - RNA, 38 nt, Artificial Sequence
  Definition of Artificial Sequence:  Enzymatic Nucleic Acid
  misc_feature (31)..(31): n stands for Inosine
cagugagccugaugaggccguuaggccgaangggcuca

SEQ ID NO: 1495 - RNA, 38 nt, Artificial Sequence
  Definition of Artificial Sequence:  Enzymatic Nucleic Acid
  misc_feature (31)..(31): n stands for Inosine
cugcagugcugaugaggccguuaggccgaancgggggc

SEQ ID NO: 1496 - RNA, 38 nt, Artificial Sequence
  Definition of Artificial Sequence:  Enzymatic Nucleic Acid
  misc_feature (31)..(31): n stands for Inosine
cacugcagcugaugaggccguuaggccgaanagcgggg

SEQ ID NO: 1497 - RNA, 38 nt, Artificial Sequence
  Definition of Artificial Sequence:  Enzymatic Nucleic Acid
  misc_feature (31)..(31): n stands for Inosine
cgcacugccugaugaggccguuaggccgaanugagcgg

SEQ ID NO: 1498 - RNA, 38 nt, Artificial Sequence
  Definition of Artificial Sequence:  Enzymatic Nucleic Acid
  misc_feature (31)..(31): n stands for Inosine
ggccgcaccugaugaggccguuaggccgaancagugag

SEQ ID NO: 1499 - RNA, 38 nt, Artificial Sequence
  Definition of Artificial Sequence:  Enzymatic Nucleic Acid
  misc_feature (31)..(31): n stands for Inosine
agcccucgcugaugaggccguuaggccgaanccgcacu

SEQ ID NO: 1500 - RNA, 38 nt, Artificial Sequence
  Definition of Artificial Sequence:  Enzymatic Nucleic Acid
  misc_feature (31)..(31): n stands for Inosine
gagcccuccugaugaggccguuaggccgaangccgcac

SEQ ID NO: 1501 - RNA, 38 nt, Artificial Sequence
  Definition of Artificial Sequence:  Enzymatic Nucleic Acid
  misc_feature (31)..(31): n stands for Inosine
uggcucggcugaugaggccguuaggccgaancccucgg

SEQ ID NO: 1502 - RNA, 38 nt, Artificial Sequence
  Definition of Artificial Sequence:  Enzymatic Nucleic Acid
  misc_feature (31)..(31): n stands for Inosine
gguggcuccugaugaggccguuaggccgaanagcccuc

SEQ ID NO: 1503 - RNA, 38 nt, Artificial Sequence
  Definition of Artificial Sequence:  Enzymatic Nucleic Acid
  misc_feature (31)..(31): n stands for Inosine
acccuggucugaugaggccguuaggccgaancucggag

SEQ ID NO: 1504 - RNA, 38 nt, Artificial Sequence
  Definition of Artificial Sequence:  Enzymatic Nucleic Acid
  misc_feature (31)..(31): n stands for Inosine
aacccuggcugaugaggccguuaggccgaangcucgga

SEQ ID NO: 1505 - RNA, 38 nt, Artificial Sequence
  Definition of Artificial Sequence:  Enzymatic Nucleic Acid
  misc_feature (31)..(31): n stands for Inosine
ggaacccucugaugaggccguuaggccgaanuggcucg

SEQ ID NO: 1506 - RNA, 38 nt, Artificial Sequence
  Definition of Artificial Sequence:  Enzymatic Nucleic Acid
  misc_feature (31)..(31): n stands for Inosine
gggaaccccugaugaggccguuaggccgaanguggcuc

SEQ ID NO: 1507 - RNA, 38 nt, Artificial Sequence
  Definition of Artificial Sequence:  Enzymatic Nucleic Acid
  misc_feature (31)..(31): n stands for Inosine
cgagguggcugaugaggccguuaggccgaanaacccug

SEQ ID NO: 1508 - RNA, 38 nt, Artificial Sequence
  Definition of Artificial Sequence:  Enzymatic Nucleic Acid
  misc_feature (31)..(31): n stands for Inosine
ccgaggugcugaugaggccguuaggccgaangaacccu

SEQ ID NO: 1509 - RNA, 38 nt, Artificial Sequence
  Definition of Artificial Sequence:  Enzymatic Nucleic Acid
  misc_feature (31)..(31): n stands for Inosine
cccgaggucugaugaggccguuaggccgaanggaaccc

SEQ ID NO: 1510 - RNA, 38 nt, Artificial Sequence
  Definition of Artificial Sequence:  Enzymatic Nucleic Acid
  misc_feature (31)..(31): n stands for Inosine
gcccgaggcugaugaggccguuaggccgaangggaacc

SEQ ID NO: 1511 - RNA, 38 nt, Artificial Sequence
  Definition of Artificial Sequence:  Enzymatic Nucleic Acid
  misc_feature (31)..(31): n stands for Inosine
gggcccgacugaugaggccguuaggccgaanuggggaa

SEQ ID NO: 1512 - RNA, 38 nt, Artificial Sequence
  Definition of Artificial Sequence:  Enzymatic Nucleic Acid
  misc_feature (31)..(31): n stands for Inosine
agggcccgcugaugaggccguuaggccgaangugggga

SEQ ID NO: 1513 - RNA, 38 nt, Artificial Sequence
  Definition of Artificial Sequence:  Enzymatic Nucleic Acid
  misc_feature (31)..(31): n stands for Inosine
ccggcgagcugaugaggccguuaggccgaancccgagg

SEQ ID NO: 1514 - RNA, 38 nt, Artificial Sequence
  Definition of Artificial Sequence:  Enzymatic Nucleic Acid
  misc_feature (31)..(31): n stands for Inosine
uccggcgacugaugaggccguuaggccgaangcccgag

SEQ ID NO: 1515 - RNA, 38 nt, Artificial Sequence
  Definition of Artificial Sequence:  Enzymatic Nucleic Acid
  misc_feature (31)..(31): n stands for Inosine
cuccggcgcugaugaggccguuaggccgaanggcccga

SEQ ID NO: 1516 - RNA, 38 nt, Artificial Sequence
  Definition of Artificial Sequence:  Enzymatic Nucleic Acid
  misc_feature (31)..(31): n stands for Inosine
uggccucccugaugaggccguuaggccgaancgagggc

SEQ ID NO: 1517 - RNA, 38 nt, Artificial Sequence
  Definition of Artificial Sequence:  Enzymatic Nucleic Acid
  misc_feature (31)..(31): n stands for Inosine
aacagccucugaugaggccguuaggccgaanccuccgg

SEQ ID NO: 1518 - RNA, 38 nt, Artificial Sequence
  Definition of Artificial Sequence:  Enzymatic Nucleic Acid
  misc_feature (31)..(31): n stands for Inosine
gaacagcccugaugaggccguuaggccgaangccuccg

SEQ ID NO: 1519 - RNA, 38 nt, Artificial Sequence
  Definition of Artificial Sequence:  Enzymatic Nucleic Acid
  misc_feature (31)..(31): n stands for Inosine
gcgugaaccugaugaggccguuaggccgaanccuggcc

SEQ ID NO: 1520 - RNA, 38 nt, Artificial Sequence
  Definition of Artificial Sequence:  Enzymatic Nucleic Acid
  misc_feature (31)..(31): n stands for Inosine
uucuugcgcugaugaggccguuaggccgaanaacagcc

SEQ ID NO: 1521 - RNA, 38 nt, Artificial Sequence
  Definition of Artificial Sequence:  Enzymatic Nucleic Acid
  misc_feature (31)..(31): n stands for Inosine
gcgguucucugaugaggccguuaggccgaancgugaac

SEQ ID NO: 1522 - RNA, 38 nt, Artificial Sequence
  Definition of Artificial Sequence:  Enzymatic Nucleic Acid
  misc_feature (31)..(31): n stands for Inosine
gcgggugccugaugaggccguuaggccgaanuucuugc

SEQ ID NO: 1523 - RNA, 38 nt, Artificial Sequence
  Definition of Artificial Sequence:  Enzymatic Nucleic Acid
  misc_feature (31)..(31): n stands for Inosine
gcugcgggcugaugaggccguuaggccgaancgguucu

SEQ ID NO: 1524 - RNA, 38 nt, Artificial Sequence
  Definition of Artificial Sequence:  Enzymatic Nucleic Acid
  misc_feature (31)..(31): n stands for Inosine
uggcugcgcugaugaggccguuaggccgaanugcgguu

SEQ ID NO: 1525 - RNA, 38 nt, Artificial Sequence
  Definition of Artificial Sequence:  Enzymatic Nucleic Acid
  misc_feature (31)..(31): n stands for Inosine
guggcugccugaugaggccguuaggccgaangugcggu

SEQ ID NO: 1526 - RNA, 38 nt, Artificial Sequence
  Definition of Artificial Sequence:  Enzymatic Nucleic Acid
  misc_feature (31)..(31): n stands for Inosine
gcaguggccugaugaggccguuaggccgaancgggugc

SEQ ID NO: 1527 - RNA, 38 nt, Artificial Sequence
  Definition of Artificial Sequence:  Enzymatic Nucleic Acid
  misc_feature (31)..(31): n stands for Inosine
acggcagucugaugaggccguuaggccgaancugcggg

SEQ ID NO: 1528 - RNA, 38 nt, Artificial Sequence
  Definition of Artificial Sequence:  Enzymatic Nucleic Acid
  misc_feature (31)..(31): n stands for Inosine
gacggcagcugaugaggccguuaggccgaangcugcgg

SEQ ID NO: 1529 - RNA, 38 nt, Artificial Sequence
  Definition of Artificial Sequence:  Enzymatic Nucleic Acid
  misc_feature (31)..(31): n stands for Inosine
cagacggccugaugaggccguuaggccgaanuggcugc

SEQ ID NO: 1530 - RNA, 38 nt, Artificial Sequence
  Definition of Artificial Sequence:  Enzymatic Nucleic Acid
  misc_feature (31)..(31): n stands for Inosine
gcccagaccugaugaggccguuaggccgaancaguggc

SEQ ID NO: 1531 - RNA, 38 nt, Artificial Sequence
  Definition of Artificial Sequence:  Enzymatic Nucleic Acid
  misc_feature (31)..(31): n stands for Inosine
ccuggccccugaugaggccguuaggccgaanacggcag

SEQ ID NO: 1532 - RNA, 38 nt, Artificial Sequence
  Definition of Artificial Sequence:  Enzymatic Nucleic Acid
  misc_feature (31)..(31): n stands for Inosine
gccugccucugaugaggccguuaggccgaancccagac

SEQ ID NO: 1533 - RNA, 38 nt, Artificial Sequence
  Definition of Artificial Sequence:  Enzymatic Nucleic Acid
  misc_feature (31)..(31): n stands for Inosine
ugccugcccugaugaggccguuaggccgaangcccaga

SEQ ID NO: 1534 - RNA, 38 nt, Artificial Sequence
  Definition of Artificial Sequence:  Enzymatic Nucleic Acid
  misc_feature (31)..(31): n stands for Inosine
ccgcugcccugaugaggccguuaggccgaanccuggcc

SEQ ID NO: 1535 - RNA, 38 nt, Artificial Sequence
  Definition of Artificial Sequence:  Enzymatic Nucleic Acid
  misc_feature (31)..(31): n stands for Inosine
acccccgccugaugaggccguuaggccgaanccugccu

SEQ ID NO: 1536 - RNA, 38 nt, Artificial Sequence
  Definition of Artificial Sequence:  Enzymatic Nucleic Acid
  misc_feature (31)..(31): n stands for Inosine
gagucacccugaugaggccguuaggccgaanucccgcc

SEQ ID NO: 1537 - RNA, 38 nt, Artificial Sequence
  Definition of Artificial Sequence:  Enzymatic Nucleic Acid
  misc_feature (31)..(31): n stands for Inosine
gccuucugcugaugaggccguuaggccgaanucaccag

SEQ ID NO: 1538 - RNA, 38 nt, Artificial Sequence
  Definition of Artificial Sequence:  Enzymatic Nucleic Acid
  misc_feature (31)..(31): n stands for Inosine
gagccuuccugaugaggccguuaggccgaanagucacc

SEQ ID NO: 1539 - RNA, 38 nt, Artificial Sequence
  Definition of Artificial Sequence:  Enzymatic Nucleic Acid
  misc_feature (31)..(31): n stands for Inosine
ggcaccugcugaugaggccguuaggccgaanccuucug

SEQ ID NO: 1540 - RNA, 38 nt, Artificial Sequence
  Definition of Artificial Sequence:  Enzymatic Nucleic Acid
  misc_feature (31)..(31): n stands for Inosine
agggcacccugaugaggccguuaggccgaanagccuuc

SEQ ID NO: 1541 - RNA, 38 nt, Artificial Sequence
  Definition of Artificial Sequence:  Enzymatic Nucleic Acid
  misc_feature (31)..(31): n stands for Inosine
cuggguagcugaugaggccguuaggccgaancaccuga

SEQ ID NO: 1542 - RNA, 38 nt, Artificial Sequence
  Definition of Artificial Sequence:  Enzymatic Nucleic Acid
  misc_feature (31)..(31): n stands for Inosine
gcuggguacugaugaggccguuaggccgaangcaccug

SEQ ID NO: 1543 - RNA, 38 nt, Artificial Sequence
  Definition of Artificial Sequence:  Enzymatic Nucleic Acid
  misc_feature (31)..(31): n stands for Inosine
ggcugggucugaugaggccguuaggccgaanggcaccu

SEQ ID NO: 1544 - RNA, 38 nt, Artificial Sequence
  Definition of Artificial Sequence:  Enzymatic Nucleic Acid
  misc_feature (31)..(31): n stands for Inosine
ugaggcugcugaugaggccguuaggccgaanuagggca

SEQ ID NO: 1545 - RNA, 38 nt, Artificial Sequence
  Definition of Artificial Sequence:  Enzymatic Nucleic Acid
  misc_feature (31)..(31): n stands for Inosine
gugaggcucugaugaggccguuaggccgaanguagggc

SEQ ID NO: 1546 - RNA, 38 nt, Artificial Sequence
  Definition of Artificial Sequence:  Enzymatic Nucleic Acid
  misc_feature (31)..(31): n stands for Inosine
ggugaggccugaugaggccguuaggccgaangguaggg

SEQ ID NO: 1547 - RNA, 38 nt, Artificial Sequence
  Definition of Artificial Sequence:  Enzymatic Nucleic Acid
  misc_feature (31)..(31): n stands for Inosine
gcaggugacugaugaggccguuaggccgaancugggua

SEQ ID NO: 1548 - RNA, 38 nt, Artificial Sequence
  Definition of Artificial Sequence:  Enzymatic Nucleic Acid
  misc_feature (31)..(31): n stands for Inosine
ugcaggugcugaugaggccguuaggccgaangcugggu

SEQ ID NO: 1549 - RNA, 38 nt, Artificial Sequence
  Definition of Artificial Sequence:  Enzymatic Nucleic Acid
  misc_feature (31)..(31): n stands for Inosine
gcugcaggcugaugaggccguuaggccgaanaggcugg

SEQ ID NO: 1550 - RNA, 38 nt, Artificial Sequence
  Definition of Artificial Sequence:  Enzymatic Nucleic Acid
  misc_feature (31)..(31): n stands for Inosine
aggcugcacugaugaggccguuaggccgaanugaggcu

SEQ ID NO: 1551 - RNA, 38 nt, Artificial Sequence
  Definition of Artificial Sequence:  Enzymatic Nucleic Acid
  misc_feature (31)..(31): n stands for Inosine
gaggcugccugaugaggccguuaggccgaangugaggc

SEQ ID NO: 1552 - RNA, 38 nt, Artificial Sequence
  Definition of Artificial Sequence:  Enzymatic Nucleic Acid
  misc_feature (31)..(31): n stands for Inosine
ggugaggccugaugaggccguuaggccgaancagguga

SEQ ID NO: 1553 - RNA, 38 nt, Artificial Sequence
  Definition of Artificial Sequence:  Enzymatic Nucleic Acid
  misc_feature (31)..(31): n stands for Inosine
gggggugacugaugaggccguuaggccgaancugcagg

SEQ ID NO: 1554 - RNA, 38 nt, Artificial Sequence
  Definition of Artificial Sequence:  Enzymatic Nucleic Acid
  misc_feature (31)..(31): n stands for Inosine
ggggggugcugaugaggccguuaggccgaangcugcag

SEQ ID NO: 1555 - RNA, 38 nt, Artificial Sequence
  Definition of Artificial Sequence:  Enzymatic Nucleic Acid
  misc_feature (31)..(31): n stands for Inosine
caggggggcugaugaggccguuaggccgaanaggcugc

SEQ ID NO: 1556 - RNA, 38 nt, Artificial Sequence
  Definition of Artificial Sequence:  Enzymatic Nucleic Acid
  misc_feature (31)..(31): n stands for Inosine
cccaggggcugaugaggccguuaggccgaanugaggcu

SEQ ID NO: 1557 - RNA, 38 nt, Artificial Sequence
  Definition of Artificial Sequence:  Enzymatic Nucleic Acid
  misc_feature (31)..(31): n stands for Inosine
gcccagggcugaugaggccguuaggccgaangugaggc

SEQ ID NO: 1558 - RNA, 38 nt, Artificial Sequence
  Definition of Artificial Sequence:  Enzymatic Nucleic Acid
  misc_feature (31)..(31): n stands for Inosine
ggcccaggcugaugaggccguuaggccgaanggugagg

SEQ ID NO: 1559 - RNA, 38 nt, Artificial Sequence
  Definition of Artificial Sequence:  Enzymatic Nucleic Acid
  misc_feature (31)..(31): n stands for Inosine
aggcccagcugaugaggccguuaggccgaangggugag

SEQ ID NO: 1560 - RNA, 38 nt, Artificial Sequence
  Definition of Artificial Sequence:  Enzymatic Nucleic Acid
  misc_feature (31)..(31): n stands for Inosine
caggcccacugaugaggccguuaggccgaangggguga

SEQ ID NO: 1561 - RNA, 38 nt, Artificial Sequence
  Definition of Artificial Sequence:  Enzymatic Nucleic Acid
  misc_feature (31)..(31): n stands for Inosine
ccaggccccugaugaggccguuaggccgaangggggug

SEQ ID NO: 1562 - RNA, 38 nt, Artificial Sequence
  Definition of Artificial Sequence:  Enzymatic Nucleic Acid
  misc_feature (31)..(31): n stands for Inosine
cagcgccacugaugaggccguuaggccgaancccaggg

SEQ ID NO: 1563 - RNA, 38 nt, Artificial Sequence
  Definition of Artificial Sequence:  Enzymatic Nucleic Acid
  misc_feature (31)..(31): n stands for Inosine
ccagcgcccugaugaggccguuaggccgaangcccagg

SEQ ID NO: 1564 - RNA, 38 nt, Artificial Sequence
  Definition of Artificial Sequence:  Enzymatic Nucleic Acid
  misc_feature (31)..(31): n stands for Inosine
acagcacccugaugaggccguuaggccgaancgccagg

SEQ ID NO: 1565 - RNA, 38 nt, Artificial Sequence
  Definition of Artificial Sequence:  Enzymatic Nucleic Acid
  misc_feature (31)..(31): n stands for Inosine
cuguccaccugaugaggccguuaggccgaancaccagc

SEQ ID NO: 1566 - RNA, 38 nt, Artificial Sequence
  Definition of Artificial Sequence:  Enzymatic Nucleic Acid
  misc_feature (31)..(31): n stands for Inosine
ccaagcaccugaugaggccguuaggccgaanuccacag

SEQ ID NO: 1567 - RNA, 38 nt, Artificial Sequence
  Definition of Artificial Sequence:  Enzymatic Nucleic Acid
  misc_feature (31)..(31): n stands for Inosine
agggcccacugaugaggccguuaggccgaancacuguc

SEQ ID NO: 1568 - RNA, 38 nt, Artificial Sequence
  Definition of Artificial Sequence:  Enzymatic Nucleic Acid
  misc_feature (31)..(31): n stands for Inosine
gucagcagcugaugaggccguuaggccgaancccaagc

SEQ ID NO: 1569 - RNA, 38 nt, Artificial Sequence
  Definition of Artificial Sequence:  Enzymatic Nucleic Acid
  misc_feature (31)..(31): n stands for Inosine
ggucagcacugaugaggccguuaggccgaangcccaag

SEQ ID NO: 1570 - RNA, 38 nt, Artificial Sequence
  Definition of Artificial Sequence:  Enzymatic Nucleic Acid
  misc_feature (31)..(31): n stands for Inosine
gggucagccugaugaggccguuaggccgaanggcccaa

SEQ ID NO: 1571 - RNA, 38 nt, Artificial Sequence
  Definition of Artificial Sequence:  Enzymatic Nucleic Acid
  misc_feature (31)..(31): n stands for Inosine
uggggguccugaugaggccguuaggccgaancagggcc

SEQ ID NO: 1572 - RNA, 37 nt, Artificial Sequence
  Definition of Artificial Sequence:  Enzymatic Nucleic Acid
agcggacggccgaaaggcgagugaggucuccucuuca

SEQ ID NO: 1573 - RNA, 37 nt, Artificial Sequence
  Definition of Artificial Sequence:  Enzymatic Nucleic Acid
ccagcggagccgaaaggcgagugaggucugcccucuu

SEQ ID NO: 1574 - RNA, 37 nt, Artificial Sequence
  Definition of Artificial Sequence:  Enzymatic Nucleic Acid
cccuccaggccgaaaggcgagugaggucuggacgccc

SEQ ID NO: 1575 - RNA, 37 nt, Artificial Sequence
  Definition of Artificial Sequence:  Enzymatic Nucleic Acid
gcagccgggccgaaaggcgagugaggucuucccucca

SEQ ID NO: 1576 - RNA, 37 nt, Artificial Sequence
  Definition of Artificial Sequence:  Enzymatic Nucleic Acid
gccagcaggccgaaaggcgagugaggucucggcuccc

SEQ ID NO: 1577 - RNA, 37 nt, Artificial Sequence
  Definition of Artificial Sequence:  Enzymatic Nucleic Acid
caugccaggccgaaaggcgagugaggucuagccggcu

SEQ ID NO: 1578 - RNA, 37 nt, Artificial Sequence
  Definition of Artificial Sequence:  Enzymatic Nucleic Acid
cacccauggccgaaaggcgagugaggucucagcagcc

SEQ ID NO: 1579 - RNA, 37 nt, Artificial Sequence
  Definition of Artificial Sequence:  Enzymatic Nucleic Acid
ccacagcagccgaaaggcgagugaggucuccaugcca

SEQ ID NO: 1580 - RNA, 37 nt, Artificial Sequence
  Definition of Artificial Sequence:  Enzymatic Nucleic Acid
agccacaggccgaaaggcgagugaggucuacccaugc

SEQ ID NO: 1581 - RNA, 37 nt, Artificial Sequence
  Definition of Artificial Sequence:  Enzymatic Nucleic Acid
ugcagccagccgaaaggcgagugaggucuagcaccca

SEQ ID NO: 1582 - RNA, 37 nt, Artificial Sequence
  Definition of Artificial Sequence:  Enzymatic Nucleic Acid
gccugcaggccgaaaggcgagugaggucucacagcac

SEQ ID NO: 1583 - RNA, 37 nt, Artificial Sequence
  Definition of Artificial Sequence:  Enzymatic Nucleic Acid
caggccuggccgaaaggcgagugaggucuagccacag

SEQ ID NO: 1584 - RNA, 37 nt, Artificial Sequence
  Definition of Artificial Sequence:  Enzymatic Nucleic Acid
cugccagggccgaaaggcgagugaggucucugcagcc

SEQ ID NO: 1585 - RNA, 37 nt, Artificial Sequence
  Definition of Artificial Sequence:  Enzymatic Nucleic Acid
gccaccuggccgaaaggcgagugaggucucaggccug

SEQ ID NO: 1586 - RNA, 37 nt, Artificial Sequence
  Definition of Artificial Sequence:  Enzymatic Nucleic Acid
ggcugccagccgaaaggcgagugaggucucugccagg

SEQ ID NO: 1587 - RNA, 37 nt, Artificial Sequence
  Definition of Artificial Sequence:  Enzymatic Nucleic Acid
uggggcuggccgaaaggcgagugaggucucaccugcc

SEQ ID NO: 1588 - RNA, 37 nt, Artificial Sequence
  Definition of Artificial Sequence:  Enzymatic Nucleic Acid
gcaugggggccgaaaggcgagugaggucuugccaccu

SEQ ID NO: 1589 - RNA, 37 nt, Artificial Sequence
  Definition of Artificial Sequence:  Enzymatic Nucleic Acid
caccuggggccgaaaggcgagugaggucuauggggcu

SEQ ID NO: 1590 - RNA, 37 nt, Artificial Sequence
  Definition of Artificial Sequence:  Enzymatic Nucleic Acid
cgcaggcagccgaaaggcgagugaggucucugggcau

SEQ ID NO: 1591 - RNA, 37 nt, Artificial Sequence
  Definition of Artificial Sequence:  Enzymatic Nucleic Acid
uacgcagggccgaaaggcgagugaggucuaccugggc

SEQ ID NO: 1592 - RNA, 37 nt, Artificial Sequence
  Definition of Artificial Sequence:  Enzymatic Nucleic Acid
agcauacggccgaaaggcgagugaggucuaggcaccu

SEQ ID NO: 1593 - RNA, 37 nt, Artificial Sequence
  Definition of Artificial Sequence:  Enzymatic Nucleic Acid
guagcauagccgaaaggcgagugaggucugcaggcac

SEQ ID NO: 1594 - RNA, 37 nt, Artificial Sequence
  Definition of Artificial Sequence:  Enzymatic Nucleic Acid
cauuguaggccgaaaggcgagugaggucuauacgcag

SEQ ID NO: 1595 - RNA, 37 nt, Artificial Sequence
  Definition of Artificial Sequence:  Enzymatic Nucleic Acid
accuuggggccgaaaggcgagugaggucuucauugua

SEQ ID NO: 1596 - RNA, 37 nt, Artificial Sequence
  Definition of Artificial Sequence:  Enzymatic Nucleic Acid
ugucgucagccgaaaggcgagugaggucucuugggcu

SEQ ID NO: 1597 - RNA, 37 nt, Artificial Sequence
  Definition of Artificial Sequence:  Enzymatic Nucleic Acid
gggggcaggccgaaaggcgagugaggucuuugucguc

SEQ ID NO: 1598 - RNA, 37 nt, Artificial Sequence
  Definition of Artificial Sequence:  Enzymatic Nucleic Acid
gcuggggggccgaaaggcgagugaggucuagcuuguc

SEQ ID NO: 1599 - RNA, 37 nt, Artificial Sequence
  Definition of Artificial Sequence:  Enzymatic Nucleic Acid
aggcccuggccgaaaggcgagugaggucuugggggca

SEQ ID NO: 1600 - RNA, 37 nt, Artificial Sequence
  Definition of Artificial Sequence:  Enzymatic Nucleic Acid
ccugcagggccgaaaggcgagugaggucuccugcugg

SEQ ID NO: 1601 - RNA, 37 nt, Artificial Sequence
  Definition of Artificial Sequence:  Enzymatic Nucleic Acid
acagccuggccgaaaggcgagugaggucuaggcccug

SEQ ID NO: 1602 - RNA, 37 nt, Artificial Sequence
  Definition of Artificial Sequence:  Enzymatic Nucleic Acid
gggcacaggccgaaaggcgagugaggucucugcaggc

SEQ ID NO: 1603 - RNA, 37 nt, Artificial Sequence
  Definition of Artificial Sequence:  Enzymatic Nucleic Acid
cacgggcagccgaaaggcgagugaggucuagccugca

SEQ ID NO: 1604 - RNA, 37 nt, Artificial Sequence
  Definition of Artificial Sequence:  Enzymatic Nucleic Acid
cccacggggccgaaaggcgagugaggucuacagccug

SEQ ID NO: 1605 - RNA, 37 nt, Artificial Sequence
  Definition of Artificial Sequence:  Enzymatic Nucleic Acid
gaugcccagccgaaaggcgagugaggucugggcacag

SEQ ID NO: 1606 - RNA, 37 nt, Artificial Sequence
  Definition of Artificial Sequence:  Enzymatic Nucleic Acid
cagggauggccgaaaggcgagugaggucuccacgggc

SEQ ID NO: 1607 - RNA, 37 nt, Artificial Sequence
  Definition of Artificial Sequence:  Enzymatic Nucleic Acid
gcuggcaggccgaaaggcgagugaggucuagggaugc

SEQ ID NO: 1608 - RNA, 37 nt, Artificial Sequence
  Definition of Artificial Sequence:  Enzymatic Nucleic Acid
cuggcugggccgaaaggcgagugaggucuagcaggga

SEQ ID NO: 1609 - RNA, 37 nt, Artificial Sequence
  Definition of Artificial Sequence:  Enzymatic Nucleic Acid
ugcgcugggccgaaaggcgagugaggucuuggcagca

SEQ ID NO: 1610 - RNA, 37 nt, Artificial Sequence
  Definition of Artificial Sequence:  Enzymatic Nucleic Acid
aagaugcggccgaaaggcgagugaggucuuggcuggc

SEQ ID NO: 1611 - RNA, 37 nt, Artificial Sequence
  Definition of Artificial Sequence:  Enzymatic Nucleic Acid
ggaagauggccgaaaggcgagugaggucugcuggcug

SEQ ID NO: 1612 - RNA, 37 nt, Artificial Sequence
  Definition of Artificial Sequence:  Enzymatic Nucleic Acid
uugccguggccgaaaggcgagugaggucuaggaagau

SEQ ID NO: 1613 - RNA, 37 nt, Artificial Sequence
  Definition of Artificial Sequence:  Enzymatic Nucleic Acid
ugcgguuggccgaaaggcgagugaggucucgugcagg

SEQ ID NO: 1614 - RNA, 37 nt, Artificial Sequence; identical to SEQ ID NO: 1613
  Definition of Artificial Sequence:  Enzymatic Nucleic Acid

SEQ ID NO: 1615 - RNA, 37 nt, Artificial Sequence
  Definition of Artificial Sequence:  Enzymatic Nucleic Acid
gcgagauggccgaaaggcgagugaggucugguugccg

SEQ ID NO: 1616 - RNA, 37 nt, Artificial Sequence
  Definition of Artificial Sequence:  Enzymatic Nucleic Acid
ggcacauggccgaaaggcgagugaggucugagaugcg

SEQ ID NO: 1617 - RNA, 37 nt, Artificial Sequence
  Definition of Artificial Sequence:  Enzymatic Nucleic Acid
agcuggcagccgaaaggcgagugaggucuaugcgaga

SEQ ID NO: 1618 - RNA, 37 nt, Artificial Sequence
  Definition of Artificial Sequence:  Enzymatic Nucleic Acid
gcagcugggccgaaaggcgagugaggucuacaugcga

SEQ ID NO: 1619 - RNA, 37 nt, Artificial Sequence
  Definition of Artificial Sequence:  Enzymatic Nucleic Acid
gcuggcaggccgaaaggcgagugaggucuuggcacau

SEQ ID NO: 1620 - RNA, 37 nt, Artificial Sequence
  Definition of Artificial Sequence:  Enzymatic Nucleic Acid
gaagcugggccgaaaggcgagugaggucuagcuggca

SEQ ID NO: 1621 - RNA, 37 nt, Artificial Sequence
  Definition of Artificial Sequence:  Enzymatic Nucleic Acid
cacggaaggccgaaaggcgagugaggucuuggcagcu

SEQ ID NO: 1622 - RNA, 37 nt, Artificial Sequence
  Definition of Artificial Sequence:  Enzymatic Nucleic Acid
ggcaggcagccgaaaggcgagugaggucuggaagcug

SEQ ID NO: 1623 - RNA, 37 nt, Artificial Sequence
  Definition of Artificial Sequence:  Enzymatic Nucleic Acid
gcggcagggccgaaaggcgagugaggucuacggaagc

SEQ ID NO: 1624 - RNA, 37 nt, Artificial Sequence
  Definition of Artificial Sequence:  Enzymatic Nucleic Acid
gguugcgggccgaaaggcgagugaggucuaggcacgg

SEQ ID NO: 1625 - RNA, 37 nt, Artificial Sequence
  Definition of Artificial Sequence:  Enzymatic Nucleic Acid
ugagguuggccgaaaggcgagugaggucuggcaggca

SEQ ID NO: 1626 - RNA, 37 nt, Artificial Sequence
  Definition of Artificial Sequence:  Enzymatic Nucleic Acid
ugcagccagccgaaaggcgagugaggucuaggauggu

SEQ ID NO: 1627 - RNA, 37 nt, Artificial Sequence
  Definition of Artificial Sequence:  Enzymatic Nucleic Acid
gagugcaggccgaaaggcgagugaggucucacaggau

SEQ ID NO: 1628 - RNA, 37 nt, Artificial Sequence
  Definition of Artificial Sequence:  Enzymatic Nucleic Acid
uucgaguggccgaaaggcgagugaggucuagccacag

SEQ ID NO: 1629 - RNA, 37 nt, Artificial Sequence
  Definition of Artificial Sequence:  Enzymatic Nucleic Acid
ggccagcagccgaaaggcgagugaggucuauucgagu

SEQ ID NO: 1630 - RNA, 37 nt, Artificial Sequence
  Definition of Artificial Sequence:  Enzymatic Nucleic Acid
cgggccaggccgaaaggcgagugaggucuacauucga

SEQ ID NO: 1631 - RNA, 37 nt, Artificial Sequence
  Definition of Artificial Sequence:  Enzymatic Nucleic Acid
aauucggggccgaaaggcgagugaggucucagcacau

SEQ ID NO: 1632 - RNA, 37 nt, Artificial Sequence
  Definition of Artificial Sequence:  Enzymatic Nucleic Acid
ggcagccggccgaaaggcgagugaggucuaucaauuc

SEQ ID NO: 1633 - RNA, 37 nt, Artificial Sequence
  Definition of Artificial Sequence:  Enzymatic Nucleic Acid
gaaggcaggccgaaaggcgagugaggucucgcaucaa

SEQ ID NO: 1634 - RNA, 37 nt, Artificial Sequence
  Definition of Artificial Sequence:  Enzymatic Nucleic Acid
agugaagggccgaaaggcgagugaggucuagccgcau

SEQ ID NO: 1635 - RNA, 37 nt, Artificial Sequence
  Definition of Artificial Sequence:  Enzymatic Nucleic Acid
gggccagggccgaaaggcgagugaggucucagugaag

SEQ ID NO: 1636 - RNA, 37 nt, Artificial Sequence
  Definition of Artificial Sequence:  Enzymatic Nucleic Acid
caggaggggccgaaaggcgagugaggucucaggccag

SEQ ID NO: 1637 - RNA, 37 nt, Artificial Sequence
  Definition of Artificial Sequence:  Enzymatic Nucleic Acid
uccagcuggccgaaaggcgagugaggucuuccaggag

SEQ ID NO: 1638 - RNA, 37 nt, Artificial Sequence
  Definition of Artificial Sequence:  Enzymatic Nucleic Acid
agguccaggccgaaaggcgagugaggucuugcuccag

SEQ ID NO: 1639 - RNA, 37 nt, Artificial Sequence
  Definition of Artificial Sequence:  Enzymatic Nucleic Acid
cauuaucggccgaaaggcgagugaggucuugaggucc

SEQ ID NO: 1640 - RNA, 37 nt, Artificial Sequence
  Definition of Artificial Sequence:  Enzymatic Nucleic Acid
gagcuguggccgaaaggcgagugaggucuauuaucgc

SEQ ID NO: 1641 - RNA, 37 nt, Artificial Sequence
  Definition of Artificial Sequence:  Enzymatic Nucleic Acid
gaccggaggccgaaaggcgagugaggucuugugcauu

SEQ ID NO: 1642 - RNA, 37 nt, Artificial Sequence
  Definition of Artificial Sequence:  Enzymatic Nucleic Acid
uccacagagccgaaaggcgagugaggucucggagcug

SEQ ID NO: 1643 - RNA, 37 nt, Artificial Sequence
  Definition of Artificial Sequence:  Enzymatic Nucleic Acid
aggguccagccgaaaggcgagugaggucuagaccgga

SEQ ID NO: 1644 - RNA, 37 nt, Artificial Sequence
  Definition of Artificial Sequence:  Enzymatic Nucleic Acid
gaaugugggccgaaaggcgagugaggucuagggucca

SEQ ID NO: 1645 - RNA, 37 nt, Artificial Sequence
  Definition of Artificial Sequence:  Enzymatic Nucleic Acid
ggcccagggccgaaaggcgagugaggucucguggaau

SEQ ID NO: 1646 - RNA, 37 nt, Artificial Sequence
  Definition of Artificial Sequence:  Enzymatic Nucleic Acid
guaggcgggccgaaaggcgagugaggucuccaggccg

SEQ ID NO: 1647 - RNA, 37 nt, Artificial Sequence
  Definition of Artificial Sequence:  Enzymatic Nucleic Acid
uguguagggccgaaaggcgagugaggucuggcccagg

SEQ ID NO: 1648 - RNA, 37 nt, Artificial Sequence
  Definition of Artificial Sequence:  Enzymatic Nucleic Acid
aggugcaggccgaaaggcgagugaggucuguguguag

SEQ ID NO: 1649 - RNA, 37 nt, Artificial Sequence
  Definition of Artificial Sequence:  Enzymatic Nucleic Acid
uccagguggccgaaaggcgagugaggucuagcgugug

SEQ ID NO: 1650 - RNA, 37 nt, Artificial Sequence
  Definition of Artificial Sequence:  Enzymatic Nucleic Acid
ggccgcaggccgaaaggcgagugaggucugguccagg

SEQ ID NO: 1651 - RNA, 37 nt, Artificial Sequence
  Definition of Artificial Sequence:  Enzymatic Nucleic Acid
gcaggccggccgaaaggcgagugaggucuagcggucc

SEQ ID NO: 1652 - RNA, 37 nt, Artificial Sequence
  Definition of Artificial Sequence:  Enzymatic Nucleic Acid
ccugcagggccgaaaggcgagugaggucucgcagcgg

SEQ ID NO: 1653 - RNA, 37 nt, Artificial Sequence
  Definition of Artificial Sequence:  Enzymatic Nucleic Acid
agcuccuggccgaaaggcgagugaggucuaggccgca

SEQ ID NO: 1654 - RNA, 37 nt, Artificial Sequence
  Definition of Artificial Sequence:  Enzymatic Nucleic Acid
gggcccaggccgaaaggcgagugaggucuuccugcag

SEQ ID NO: 1655 - RNA, 37 nt, Artificial Sequence
  Definition of Artificial Sequence:  Enzymatic Nucleic Acid
gccccggggccgaaaggcgagugaggucuccagcucc

SEQ ID NO: 1656 - RNA, 37 nt, Artificial Sequence
  Definition of Artificial Sequence:  Enzymatic Nucleic Acid
cggaacaggccgaaaggcgagugaggucucccgggcc

SEQ ID NO: 1657 - RNA, 37 nt, Artificial Sequence
  Definition of Artificial Sequence:  Enzymatic Nucleic Acid
ccgcggaagccgaaaggcgagugaggucuagccccgg

SEQ ID NO: 1658 - RNA, 37 nt, Artificial Sequence
  Definition of Artificial Sequence:  Enzymatic Nucleic Acid
ccaggccggccgaaaggcgagugaggucuggaacagc

SEQ ID NO: 1659 - RNA, 37 nt, Artificial Sequence
  Definition of Artificial Sequence:  Enzymatic Nucleic Acid
cagccagggccgaaaggcgagugaggucucgcggaac

SEQ ID NO: 1660 - RNA, 37 nt, Artificial Sequence
  Definition of Artificial Sequence:  Enzymatic Nucleic Acid
cagggcaggccgaaaggcgagugaggucucaggccgc

SEQ ID NO: 1661 - RNA, 37 nt, Artificial Sequence
  Definition of Artificial Sequence:  Enzymatic Nucleic Acid
cugcaggggccgaaaggcgagugaggucuagccaggc

SEQ ID NO: 1662 - RNA, 37 nt, Artificial Sequence
  Definition of Artificial Sequence:  Enzymatic Nucleic Acid
agguacuggccgaaaggcgagugaggucuagggcagc

SEQ ID NO: 1663 - RNA, 37 nt, Artificial Sequence
  Definition of Artificial Sequence:  Enzymatic Nucleic Acid
uagagguagccgaaaggcgagugaggucuugcagggc

SEQ ID NO: 1664 - RNA, 37 nt, Artificial Sequence
  Definition of Artificial Sequence:  Enzymatic Nucleic Acid
uuguccuggccgaaaggcgagugaggucuagguagag

SEQ ID NO: 1665 - RNA, 37 nt, Artificial Sequence
  Definition of Artificial Sequence:  Enzymatic Nucleic Acid
cugcagcggccgaaaggcgagugaggucuguuguccu

SEQ ID NO: 1666 - RNA, 37 nt, Artificial Sequence
  Definition of Artificial Sequence:  Enzymatic Nucleic Acid
gccugcaggccgaaaggcgagugaggucugcguuguc

SEQ ID NO: 1667 - RNA, 37 nt, Artificial Sequence
  Definition of Artificial Sequence:  Enzymatic Nucleic Acid
agugccuggccgaaaggcgagugaggucuagcgcguu

SEQ ID NO: 1668 - RNA, 37 nt, Artificial Sequence
  Definition of Artificial Sequence:  Enzymatic Nucleic Acid
aggcaguggccgaaaggcgagugaggucucugcagcg

SEQ ID NO: 1669 - RNA, 37 nt, Artificial Sequence
  Definition of Artificial Sequence:  Enzymatic Nucleic Acid
ucaucagggccgaaaggcgagugaggucuagugccug

SEQ ID NO: 1670 - RNA, 37 nt, Artificial Sequence
  Definition of Artificial Sequence:  Enzymatic Nucleic Acid
ccaggucggccgaaaggcgagugaggucuggaaggug

SEQ ID NO: 1671 - RNA, 37 nt, Artificial Sequence
  Definition of Artificial Sequence:  Enzymatic Nucleic Acid
ugagguuggccgaaaggcgagugaggucuccaggucg

SEQ ID NO: 1672 - RNA, 37 nt, Artificial Sequence
  Definition of Artificial Sequence:  Enzymatic Nucleic Acid
uugccguggccgaaaggcgagugaggucuaggaagag

SEQ ID NO: 1673 - RNA, 37 nt, Artificial Sequence
  Definition of Artificial Sequence:  Enzymatic Nucleic Acid
uggagauggccgaaaggcgagugaggucugguugccg

SEQ ID NO: 1674 - RNA, 37 nt, Artificial Sequence
  Definition of Artificial Sequence:  Enzymatic Nucleic Acid
cgggcacggccgaaaggcgagugaggucuuggagaug

SEQ ID NO: 1675 - RNA, 37 nt, Artificial Sequence
  Definition of Artificial Sequence:  Enzymatic Nucleic Acid
cucgggcagccgaaaggcgagugaggucugcuggaga

SEQ ID NO: 1676 - RNA, 37 nt, Artificial Sequence
  Definition of Artificial Sequence:  Enzymatic Nucleic Acid
cgcucggggccgaaaggcgagugaggucuacgcugga

SEQ ID NO: 1677 - RNA, 37 nt, Artificial Sequence
  Definition of Artificial Sequence:  Enzymatic Nucleic Acid
aaggcgcggccgaaaggcgagugaggucuucgggcac

SEQ ID NO: 1678 - RNA, 37 nt, Artificial Sequence
  Definition of Artificial Sequence:  Enzymatic Nucleic Acid
ggaaggcggccgaaaggcgagugaggucugcucgggc

SEQ ID NO: 1679 - RNA, 37 nt, Artificial Sequence
  Definition of Artificial Sequence:  Enzymatic Nucleic Acid
acggaagggccgaaaggcgagugaggucugcgcucgg

SEQ ID NO: 1680 - RNA, 37 nt, Artificial Sequence
  Definition of Artificial Sequence:  Enzymatic Nucleic Acid
gcagcccagccgaaaggcgagugaggucuggaaggcg

SEQ ID NO: 1681 - RNA, 37 nt, Artificial Sequence
  Definition of Artificial Sequence:  Enzymatic Nucleic Acid
cugugcaggccgaaaggcgagugaggucuccacggaa

SEQ ID NO: 1682 - RNA, 37 nt, Artificial Sequence
  Definition of Artificial Sequence:  Enzymatic Nucleic Acid
aggcuguggccgaaaggcgagugaggucuagcccacg

SEQ ID NO: 1683 - RNA, 37 nt, Artificial Sequence
  Definition of Artificial Sequence:  Enzymatic Nucleic Acid
ggucgagggccgaaaggcgagugaggucuugugcagc

SEQ ID NO: 1684 - RNA, 37 nt, Artificial Sequence
  Definition of Artificial Sequence:  Enzymatic Nucleic Acid
guaggagagccgaaaggcgagugaggucuggucgagg

SEQ ID NO: 1685 - RNA, 37 nt, Artificial Sequence
  Definition of Artificial Sequence:  Enzymatic Nucleic Acid
uucugguggccgaaaggcgagugaggucuaguaggag

SEQ ID NO: 1686 - RNA, 37 nt, Artificial Sequence
  Definition of Artificial Sequence:  Enzymatic Nucleic Acid
gggccacggccgaaaggcgagugaggucugguucugg

SEQ ID NO: 1687 - RNA, 37 nt, Artificial Sequence
  Definition of Artificial Sequence:  Enzymatic Nucleic Acid
augggccagccgaaaggcgagugaggucugcgguucu

SEQ ID NO: 1688 - RNA, 37 nt, Artificial Sequence
  Definition of Artificial Sequence:  Enzymatic Nucleic Acid
cacauggggccgaaaggcgagugaggucucacgcggu

SEQ ID NO: 1689 - RNA, 37 nt, Artificial Sequence
  Definition of Artificial Sequence:  Enzymatic Nucleic Acid
cgggugcagccgaaaggcgagugaggucuaugggcca

SEQ ID NO: 1690 - RNA, 37 nt, Artificial Sequence
  Definition of Artificial Sequence:  Enzymatic Nucleic Acid
ugcggguggccgaaaggcgagugaggucuacaugggc

SEQ ID NO: 1691 - RNA, 37 nt, Artificial Sequence
  Definition of Artificial Sequence:  Enzymatic Nucleic Acid
aaggcauggccgaaaggcgagugaggucugggugcac

SEQ ID NO: 1692 - RNA, 37 nt, Artificial Sequence
  Definition of Artificial Sequence:  Enzymatic Nucleic Acid
acggaagggccgaaaggcgagugaggucuaugcgggu

SEQ ID NO: 1693 - RNA, 37 nt, Artificial Sequence
  Definition of Artificial Sequence:  Enzymatic Nucleic Acid
caaggucagccgaaaggcgagugaggucuggaaggca

SEQ ID NO: 1694 - RNA, 37 nt, Artificial Sequence
  Definition of Artificial Sequence:  Enzymatic Nucleic Acid
ugaggcgggccgaaaggcgagugaggucucaagguca

SEQ ID NO: 1695 - RNA, 37 nt, Artificial Sequence
  Definition of Artificial Sequence:  Enzymatic Nucleic Acid
ucaugagggccgaaaggcgagugaggucuggccaagg

SEQ ID NO: 1696 - RNA, 37 nt, Artificial Sequence
  Definition of Artificial Sequence:  Enzymatic Nucleic Acid
uuggcaaagccgaaaggcgagugaggucuagauagag

SEQ ID NO: 1697 - RNA, 37 nt, Artificial Sequence
  Definition of Artificial Sequence:  Enzymatic Nucleic Acid
auuguugggccgaaaggcgagugaggucuaaacagau

SEQ ID NO: 1698 - RNA, 37 nt, Artificial Sequence
  Definition of Artificial Sequence:  Enzymatic Nucleic Acid
gggcagcggccgaaaggcgagugaggucuugauagau

SEQ ID NO: 1699 - RNA, 37 nt, Artificial Sequence
  Definition of Artificial Sequence:  Enzymatic Nucleic Acid
gugggcaggccgaaaggcgagugaggucugcugauag

SEQ ID NO: 1700 - RNA, 37 nt, Artificial Sequence
  Definition of Artificial Sequence:  Enzymatic Nucleic Acid
ucaguggggccgaaaggcgagugaggucuagcgcuga

SEQ ID NO: 1701 - RNA, 37 nt, Artificial Sequence
  Definition of Artificial Sequence:  Enzymatic Nucleic Acid
ggccaggggccgaaaggcgagugaggucucucagugg

SEQ ID NO: 1702 - RNA, 37 nt, Artificial Sequence
  Definition of Artificial Sequence:  Enzymatic Nucleic Acid
cagggggggccgaaaggcgagugaggucucagggccu

SEQ ID NO: 1703 - RNA, 37 nt, Artificial Sequence
  Definition of Artificial Sequence:  Enzymatic Nucleic Acid
agggcacggccgaaaggcgagugaggucuaggggggc

SEQ ID NO: 1704 - RNA, 37 nt, Artificial Sequence
  Definition of Artificial Sequence:  Enzymatic Nucleic Acid
gcagggcagccgaaaggcgagugaggucugcaggggg

SEQ ID NO: 1705 - RNA, 37 nt, Artificial Sequence
  Definition of Artificial Sequence:  Enzymatic Nucleic Acid
cugcaggggccgaaaggcgagugaggucuacgcaggg

SEQ ID NO: 1706 - RNA, 37 nt, Artificial Sequence
  Definition of Artificial Sequence:  Enzymatic Nucleic Acid
agguacuggccgaaaggcgagugaggucuagggcacg

SEQ ID NO: 1707 - RNA, 37 nt, Artificial Sequence
  Definition of Artificial Sequence:  Enzymatic Nucleic Acid
cucagguagccgaaaggcgagugaggucuugcagggc

SEQ ID NO: 1708 - RNA, 37 nt, Artificial Sequence
  Definition of Artificial Sequence:  Enzymatic Nucleic Acid
ucguugaggccgaaaggcgagugaggucucucaggua

SEQ ID NO: 1709 - RNA, 37 nt, Artificial Sequence
  Definition of Artificial Sequence:  Enzymatic Nucleic Acid
gucacacagccgaaaggcgagugaggucuccaggggu

SEQ ID NO: 1710 - RNA, 37 nt, Artificial Sequence
  Definition of Artificial Sequence:  Enzymatic Nucleic Acid
cagucacagccgaaaggcgagugaggucuacccaggg

SEQ ID NO: 1711 - RNA, 37 nt, Artificial Sequence
  Definition of Artificial Sequence:  Enzymatic Nucleic Acid
ggcagucagccgaaaggcgagugaggucuacacccag

SEQ ID NO: 1712 - RNA, 37 nt, Artificial Sequence
  Definition of Artificial Sequence:  Enzymatic Nucleic Acid
gugcccgggccgaaaggcgagugaggucuagucacac

SEQ ID NO: 1713 - RNA, 37 nt, Artificial Sequence
  Definition of Artificial Sequence:  Enzymatic Nucleic Acid
ugggcguggccgaaaggcgagugaggucuccggcagu

SEQ ID NO: 1714 - RNA, 37 nt, Artificial Sequence
  Definition of Artificial Sequence:  Enzymatic Nucleic Acid
agaguggggccgaaaggcgagugaggucugugcccgg

SEQ ID NO: 1715 - RNA, 37 nt, Artificial Sequence
  Definition of Artificial Sequence:  Enzymatic Nucleic Acid
cagccagggccgaaaggcgagugaggucuccagagug

SEQ ID NO: 1716 - RNA, 37 nt, Artificial Sequence
  Definition of Artificial Sequence:  Enzymatic Nucleic Acid
uucugcaggccgaaaggcgagugaggucucaggccca

SEQ ID NO: 1717 - RNA, 37 nt, Artificial Sequence
  Definition of Artificial Sequence:  Enzymatic Nucleic Acid
aacuucuggccgaaaggcgagugaggucuagccaggc

SEQ ID NO: 1718 - RNA, 37 nt, Artificial Sequence
  Definition of Artificial Sequence:  Enzymatic Nucleic Acid
ccgcggaagccgaaaggcgagugaggucuuucugcag

SEQ ID NO: 1719 - RNA, 37 nt, Artificial Sequence
  Definition of Artificial Sequence:  Enzymatic Nucleic Acid
aggagccggccgaaaggcgagugaggucuggaacuuc

SEQ ID NO: 1720 - RNA, 37 nt, Artificial Sequence
  Definition of Artificial Sequence:  Enzymatic Nucleic Acid
aggaggaggccgaaaggcgagugaggucucgcggaac

SEQ ID NO: 1721 - RNA, 37 nt, Artificial Sequence
  Definition of Artificial Sequence:  Enzymatic Nucleic Acid
gcagggcagccgaaaggcgagugaggucucucggagg

SEQ ID NO: 1722 - RNA, 37 nt, Artificial Sequence
  Definition of Artificial Sequence:  Enzymatic Nucleic Acid
cugcaggggccgaaaggcgagugaggucuaccucgga

SEQ ID NO: 1723 - RNA, 37 nt, Artificial Sequence
  Definition of Artificial Sequence:  Enzymatic Nucleic Acid
ggaggcuggccgaaaggcgagugaggucuagggcacc

SEQ ID NO: 1724 - RNA, 37 nt, Artificial Sequence
  Definition of Artificial Sequence:  Enzymatic Nucleic Acid
gcgggagggccgaaaggcgagugaggucuugcagggc

SEQ ID NO: 1725 - RNA, 37 nt, Artificial Sequence
  Definition of Artificial Sequence:  Enzymatic Nucleic Acid
aggcguuggccgaaaggcgagugaggucugggaggcu

SEQ ID NO: 1726 - RNA, 37 nt, Artificial Sequence
  Definition of Artificial Sequence:  Enzymatic Nucleic Acid
cagccagggccgaaaggcgagugaggucuguugcggg

SEQ ID NO: 1727 - RNA, 37 nt, Artificial Sequence
  Definition of Artificial Sequence:  Enzymatic Nucleic Acid
acggccaggccgaaaggcgagugaggucucaggcguu

SEQ ID NO: 1728 - RNA, 37 nt, Artificial Sequence
  Definition of Artificial Sequence:  Enzymatic Nucleic Acid
ggucacgggccgaaaggcgagugaggucucagccagg

SEQ ID NO: 1729 - RNA, 37 nt, Artificial Sequence
  Definition of Artificial Sequence:  Enzymatic Nucleic Acid
ugaggucagccgaaaggcgagugaggucuggccagcc

SEQ ID NO: 1730 - RNA, 37 nt, Artificial Sequence
  Definition of Artificial Sequence:  Enzymatic Nucleic Acid
cagcuagggccgaaaggcgagugaggucuguuugagg

SEQ ID NO: 1731 - RNA, 37 nt, Artificial Sequence
  Definition of Artificial Sequence:  Enzymatic Nucleic Acid
auuggcaggccgaaaggcgagugaggucuuaggcguu

SEQ ID NO: 1732 - RNA, 37 nt, Artificial Sequence
  Definition of Artificial Sequence:  Enzymatic Nucleic Acid
gucauugggccgaaaggcgagugaggucuagcuaggc

SEQ ID NO: 1733 - RNA, 37 nt, Artificial Sequence
  Definition of Artificial Sequence:  Enzymatic Nucleic Acid
cagcccuggccgaaaggcgagugaggucuaggucauu

SEQ ID NO: 1734 - RNA, 37 nt, Artificial Sequence
  Definition of Artificial Sequence:  Enzymatic Nucleic Acid
cagcgcaggccgaaaggcgagugaggucuccugcagg

SEQ ID NO: 1735 - RNA, 37 nt, Artificial Sequence
  Definition of Artificial Sequence:  Enzymatic Nucleic Acid
ccacagcggccgaaaggcgagugaggucuagcccugc

SEQ ID NO: 1736 - RNA, 37 nt, Artificial Sequence
  Definition of Artificial Sequence:  Enzymatic Nucleic Acid
ggccacaggccgaaaggcgagugaggucugcagcccu

SEQ ID NO: 1737 - RNA, 37 nt, Artificial Sequence
  Definition of Artificial Sequence:  Enzymatic Nucleic Acid
gguggccagccgaaaggcgagugaggucuagcgcagc

SEQ ID NO: 1738 - RNA, 37 nt, Artificial Sequence
  Definition of Artificial Sequence:  Enzymatic Nucleic Acid
gccggugggccgaaaggcgagugaggucucacagcgc

SEQ ID NO: 1739 - RNA, 37 nt, Artificial Sequence
  Definition of Artificial Sequence:  Enzymatic Nucleic Acid
gguaaggggccgaaaggcgagugaggucucgguggcc

SEQ ID NO: 1740 - RNA, 37 nt, Artificial Sequence
  Definition of Artificial Sequence:  Enzymatic Nucleic Acid
uggcccuggccgaaaggcgagugaggucucgguccag

SEQ ID NO: 1741 - RNA, 37 nt, Artificial Sequence
  Definition of Artificial Sequence:  Enzymatic Nucleic Acid
aucggugggccgaaaggcgagugaggucuccugccgg

SEQ ID NO: 1742 - RNA, 37 nt, Artificial Sequence
  Definition of Artificial Sequence:  Enzymatic Nucleic Acid
cccagcgggccgaaaggcgagugaggucuuccucauc

SEQ ID NO: 1743 - RNA, 37 nt, Artificial Sequence
  Definition of Artificial Sequence:  Enzymatic Nucleic Acid
agccccaggccgaaaggcgagugaggucuggcuccuc

SEQ ID NO: 1744 - RNA, 37 nt, Artificial Sequence
  Definition of Artificial Sequence:  Enzymatic Nucleic Acid
uugggaaggccgaaaggcgagugaggucucccagcgg

SEQ ID NO: 1745 - RNA, 37 nt, Artificial Sequence
  Definition of Artificial Sequence:  Enzymatic Nucleic Acid
uggcagcagccgaaaggcgagugaggucuuugggaag

SEQ ID NO: 1746 - RNA, 37 nt, Artificial Sequence
  Definition of Artificial Sequence:  Enzymatic Nucleic Acid
gcuggcaggccgaaaggcgagugaggucuacuuggga

SEQ ID NO: 1747 - RNA, 37 nt, Artificial Sequence
  Definition of Artificial Sequence:  Enzymatic Nucleic Acid
cuggcugggccgaaaggcgagugaggucuagcacuug

SEQ ID NO: 1748 - RNA, 37 nt, Artificial Sequence
  Definition of Artificial Sequence:  Enzymatic Nucleic Acid
gcaucugggccgaaaggcgagugaggucuuggcagca

SEQ ID NO: 1749 - RNA, 37 nt, Artificial Sequence
  Definition of Artificial Sequence:  Enzymatic Nucleic Acid
gucagcgggccgaaaggcgagugaggucuaucuggcu

SEQ ID NO: 1750 - RNA, 37 nt, Artificial Sequence
  Definition of Artificial Sequence:  Enzymatic Nucleic Acid
cuugucaggccgaaaggcgagugaggucuggcaucug

SEQ ID NO: 1751 - RNA, 37 nt, Artificial Sequence
  Definition of Artificial Sequence:  Enzymatic Nucleic Acid
uacugagggccgaaaggcgagugaggucucuugucag

SEQ ID NO: 1752 - RNA, 37 nt, Artificial Sequence
  Definition of Artificial Sequence:  Enzymatic Nucleic Acid
cuccaguagccgaaaggcgagugaggucuugaggccu

SEQ ID NO: 1753 - RNA, 37 nt, Artificial Sequence
  Definition of Artificial Sequence:  Enzymatic Nucleic Acid
cuuccagggccgaaaggcgagugaggucuuccaguac

SEQ ID NO: 1754 - RNA, 37 nt, Artificial Sequence
  Definition of Artificial Sequence:  Enzymatic Nucleic Acid
ugccgaaggccgaaaggcgagugaggucuuggucuuc

SEQ ID NO: 1755 - RNA, 37 nt, Artificial Sequence
  Definition of Artificial Sequence:  Enzymatic Nucleic Acid
auugccuggccgaaaggcgagugaggucucgaagcug

SEQ ID NO: 1756 - RNA, 37 nt, Artificial Sequence
  Definition of Artificial Sequence:  Enzymatic Nucleic Acid
gcgcauuggccgaaaggcgagugaggucucugccgaa

SEQ ID NO: 1757 - RNA, 37 nt, Artificial Sequence
  Definition of Artificial Sequence:  Enzymatic Nucleic Acid
cuucagcggccgaaaggcgagugaggucuauugccug

SEQ ID NO: 1758 - RNA, 37 nt, Artificial Sequence
  Definition of Artificial Sequence:  Enzymatic Nucleic Acid
cccuucaggccgaaaggcgagugaggucugcauugcc

SEQ ID NO: 1759 - RNA, 37 nt, Artificial Sequence
  Definition of Artificial Sequence:  Enzymatic Nucleic Acid
gcggcacggccgaaaggcgagugaggucugucccuuc

SEQ ID NO: 1760 - RNA, 37 nt, Artificial Sequence
  Definition of Artificial Sequence:  Enzymatic Nucleic Acid
gggcggcagccgaaaggcgagugaggucugcgucccu

SEQ ID NO: 1761 - RNA, 37 nt, Artificial Sequence
  Definition of Artificial Sequence:  Enzymatic Nucleic Acid
ccgggcgggccgaaaggcgagugaggucuacgcgucc

SEQ ID NO: 1762 - RNA, 37 nt, Artificial Sequence
  Definition of Artificial Sequence:  Enzymatic Nucleic Acid
ucaccggggccgaaaggcgagugaggucuggcacgcg

SEQ ID NO: 1763 - RNA, 37 nt, Artificial Sequence
  Definition of Artificial Sequence:  Enzymatic Nucleic Acid
ggcugucagccgaaaggcgagugaggucucgggcggc

SEQ ID NO: 1764 - RNA, 37 nt, Artificial Sequence
  Definition of Artificial Sequence:  Enzymatic Nucleic Acid
ccggcggggccgaaaggcgagugaggucuugucaccg

SEQ ID NO: 1765 - RNA, 37 nt, Artificial Sequence
  Definition of Artificial Sequence:  Enzymatic Nucleic Acid
uugcccgggccgaaaggcgagugaggucugggcuguc

SEQ ID NO: 1766 - RNA, 37 nt, Artificial Sequence
  Definition of Artificial Sequence:  Enzymatic Nucleic Acid
agccguuggccgaaaggcgagugaggucuccggcggg

SEQ ID NO: 1767 - RNA, 37 nt, Artificial Sequence
  Definition of Artificial Sequence:  Enzymatic Nucleic Acid
ggccagaggccgaaaggcgagugaggucucguugccc

SEQ ID NO: 1768 - RNA, 37 nt, Artificial Sequence
  Definition of Artificial Sequence:  Enzymatic Nucleic Acid
gccguggggccgaaaggcgagugaggucucagagccg

SEQ ID NO: 1769 - RNA, 37 nt, Artificial Sequence
  Definition of Artificial Sequence:  Enzymatic Nucleic Acid
uugauguggccgaaaggcgagugaggucucgugggcc

SEQ ID NO: 1770 - RNA, 37 nt, Artificial Sequence
  Definition of Artificial Sequence:  Enzymatic Nucleic Acid
gagccagggccgaaaggcgagugaggucuagaguccc

SEQ ID NO: 1771 - RNA, 37 nt, Artificial Sequence
  Definition of Artificial Sequence:  Enzymatic Nucleic Acid
cagcagaggccgaaaggcgagugaggucucaggcaga

SEQ ID NO: 1772 - RNA, 37 nt, Artificial Sequence
  Definition of Artificial Sequence:  Enzymatic Nucleic Acid
gggcucaggccgaaaggcgagugaggucuagagccag

SEQ ID NO: 1773 - RNA, 37 nt, Artificial Sequence
  Definition of Artificial Sequence:  Enzymatic Nucleic Acid
agcggggggccgaaaggcgagugaggucuucagcaga

SEQ ID NO: 1774 - RNA, 37 nt, Artificial Sequence
  Definition of Artificial Sequence:  Enzymatic Nucleic Acid
gcagugaggccgaaaggcgagugaggucugggggcuc

SEQ ID NO: 1775 - RNA, 37 nt, Artificial Sequence
  Definition of Artificial Sequence:  Enzymatic Nucleic Acid
ccgcacuggccgaaaggcgagugaggucuagugagcg

SEQ ID NO: 1776 - RNA, 37 nt, Artificial Sequence
  Definition of Artificial Sequence:  Enzymatic Nucleic Acid
gggccgcagccgaaaggcgagugaggucuugcaguga

SEQ ID NO: 1777 - RNA, 37 nt, Artificial Sequence
  Definition of Artificial Sequence:  Enzymatic Nucleic Acid
ucgggccggccgaaaggcgagugaggucuacugcagu

SEQ ID NO: 1778 - RNA, 37 nt, Artificial Sequence
  Definition of Artificial Sequence:  Enzymatic Nucleic Acid
cccucggggccgaaaggcgagugaggucucgcacugc

SEQ ID NO: 1779 - RNA, 37 nt, Artificial Sequence
  Definition of Artificial Sequence:  Enzymatic Nucleic Acid
gcucggaggccgaaaggcgagugaggucuccucgggc

SEQ ID NO: 1780 - RNA, 37 nt, Artificial Sequence
  Definition of Artificial Sequence:  Enzymatic Nucleic Acid
ccuggugggccgaaaggcgagugaggucuucggagcc

SEQ ID NO: 1781 - RNA, 37 nt, Artificial Sequence
  Definition of Artificial Sequence:  Enzymatic Nucleic Acid
guggggaagccgaaaggcgagugaggucuccuggugg

SEQ ID NO: 1782 - RNA, 37 nt, Artificial Sequence
  Definition of Artificial Sequence:  Enzymatic Nucleic Acid
ggcgaggggccgaaaggcgagugaggucuccgaggug

SEQ ID NO: 1783 - RNA, 37 nt, Artificial Sequence
  Definition of Artificial Sequence:  Enzymatic Nucleic Acid
gccuccgggccgaaaggcgagugaggucugagggccc

SEQ ID NO: 1784 - RNA, 37 nt, Artificial Sequence
  Definition of Artificial Sequence:  Enzymatic Nucleic Acid
cagccugggccgaaaggcgagugaggucucuccggcg

SEQ ID NO: 1785 - RNA, 37 nt, Artificial Sequence
  Definition of Artificial Sequence:  Enzymatic Nucleic Acid
gugaacaggccgaaaggcgagugaggucucuggccuc

SEQ ID NO: 1786 - RNA, 37 nt, Artificial Sequence
  Definition of Artificial Sequence:  Enzymatic Nucleic Acid
ugcgugaagccgaaaggcgagugaggucuagccuggc

SEQ ID NO: 1787 - RNA, 37 nt, Artificial Sequence
  Definition of Artificial Sequence:  Enzymatic Nucleic Acid
gguucuuggccgaaaggcgagugaggucugugaacag

SEQ ID NO: 1788 - RNA, 37 nt, Artificial Sequence
  Definition of Artificial Sequence:  Enzymatic Nucleic Acid
ugcggguggccgaaaggcgagugaggucugguucuug

SEQ ID NO: 1789 - RNA, 37 nt, Artificial Sequence
  Definition of Artificial Sequence:  Enzymatic Nucleic Acid
aguggcuggccgaaaggcgagugaggucugggugcgg

SEQ ID NO: 1790 - RNA, 37 nt, Artificial Sequence
  Definition of Artificial Sequence:  Enzymatic Nucleic Acid
ggcagugggccgaaaggcgagugaggucuugcgggug

SEQ ID NO: 1791 - RNA, 37 nt, Artificial Sequence
  Definition of Artificial Sequence:  Enzymatic Nucleic Acid
ccagacgggccgaaaggcgagugaggucuaguggcug

SEQ ID NO: 1792 - RNA, 37 nt, Artificial Sequence
  Definition of Artificial Sequence:  Enzymatic Nucleic Acid
ggcccagagccgaaaggcgagugaggucuggcagugg

SEQ ID NO: 1793 - RNA, 37 nt, Artificial Sequence
  Definition of Artificial Sequence:  Enzymatic Nucleic Acid
cugccugggccgaaaggcgagugaggucuccagacgg

SEQ ID NO: 1794 - RNA, 37 nt, Artificial Sequence
  Definition of Artificial Sequence:  Enzymatic Nucleic Acid
gcugccuggccgaaaggcgagugaggucucuggccca

SEQ ID NO: 1795 - RNA, 37 nt, Artificial Sequence
  Definition of Artificial Sequence:  Enzymatic Nucleic Acid
ccccgcuggccgaaaggcgagugaggucucugccugg

SEQ ID NO: 1796 - RNA, 37 nt, Artificial Sequence
  Definition of Artificial Sequence:  Enzymatic Nucleic Acid
cacccccggccgaaaggcgagugaggucuugccugcc

SEQ ID NO: 1797 - RNA, 37 nt, Artificial Sequence
  Definition of Artificial Sequence:  Enzymatic Nucleic Acid
ucccgccagccgaaaggcgagugaggucuccccgcug

SEQ ID NO: 1798 - RNA, 37 nt, Artificial Sequence
  Definition of Artificial Sequence:  Enzymatic Nucleic Acid
cagucccggccgaaaggcgagugaggucucacccccg

SEQ ID NO: 1799 - RNA, 37 nt, Artificial Sequence
  Definition of Artificial Sequence:  Enzymatic Nucleic Acid
cugagucagccgaaaggcgagugaggucucagucccg

SEQ ID NO: 1800 - RNA, 37 nt, Artificial Sequence
  Definition of Artificial Sequence:  Enzymatic Nucleic Acid
caccugaggccgaaaggcgagugaggucucuucugag

SEQ ID NO: 1801 - RNA, 37 nt, Artificial Sequence
  Definition of Artificial Sequence:  Enzymatic Nucleic Acid
guagggcagccgaaaggcgagugaggucucugagccu

SEQ ID NO: 1802 - RNA, 37 nt, Artificial Sequence
  Definition of Artificial Sequence:  Enzymatic Nucleic Acid
ggguaggggccgaaaggcgagugaggucuaccugagc

SEQ ID NO: 1803 - RNA, 37 nt, Artificial Sequence
  Definition of Artificial Sequence:  Enzymatic Nucleic Acid
aggugagggccgaaaggcgagugaggucuuggguagg

SEQ ID NO: 1804 - RNA, 37 nt, Artificial Sequence
  Definition of Artificial Sequence:  Enzymatic Nucleic Acid
ugaggcuggccgaaaggcgagugaggucuaggugagg

SEQ ID NO: 1805 - RNA, 37 nt, Artificial Sequence
  Definition of Artificial Sequence:  Enzymatic Nucleic Acid
gggugagggccgaaaggcgagugaggucuugcaggug

SEQ ID NO: 1806 - RNA, 37 nt, Artificial Sequence
  Definition of Artificial Sequence:  Enzymatic Nucleic Acid
gcgccagggccgaaaggcgagugaggucuccaggggg

SEQ ID NO: 1807 - RNA, 37 nt, Artificial Sequence
  Definition of Artificial Sequence:  Enzymatic Nucleic Acid
caccagcggccgaaaggcgagugaggucucaggccca

SEQ ID NO: 1808 - RNA, 37 nt, Artificial Sequence
  Definition of Artificial Sequence:  Enzymatic Nucleic Acid
agcaccaggccgaaaggcgagugaggucugccaggcc

SEQ ID NO: 1809 - RNA, 37 nt, Artificial Sequence
  Definition of Artificial Sequence:  Enzymatic Nucleic Acid
ccacagcagccgaaaggcgagugaggucucagcgcca

SEQ ID NO: 1810 - RNA, 37 nt, Artificial Sequence
  Definition of Artificial Sequence:  Enzymatic Nucleic Acid
guccacaggccgaaaggcgagugaggucuaccagcgc

SEQ ID NO: 1811 - RNA, 37 nt, Artificial Sequence
  Definition of Artificial Sequence:  Enzymatic Nucleic Acid
acuguccagccgaaaggcgagugaggucuagcaccag

SEQ ID NO: 1812 - RNA, 37 nt, Artificial Sequence
  Definition of Artificial Sequence:  Enzymatic Nucleic Acid
cccaagcagccgaaaggcgagugaggucuuguccaca

SEQ ID NO: 1813 - RNA, 37 nt, Artificial Sequence
  Definition of Artificial Sequence:  Enzymatic Nucleic Acid
ggcccaaggccgaaaggcgagugaggucuacugucca

SEQ ID NO: 1814 - RNA, 37 nt, Artificial Sequence
  Definition of Artificial Sequence:  Enzymatic Nucleic Acid
cagcaggggccgaaaggcgagugaggucuccaagcac

SEQ ID NO: 1815 - RNA, 37 nt, Artificial Sequence
  Definition of Artificial Sequence:  Enzymatic Nucleic Acid
ggggucaggccgaaaggcgagugaggucuagggccca

SEQ ID NO: 1816 - DNA, 31 bp, Artificial Sequence
  Definition of Artificial Sequence:  Enzymatic Nucleic Acid
cttcatcgggctagctacaacgaaggggttg

SEQ ID NO: 1817 - DNA, 31 bp, Artificial Sequence
  Definition of Artificial Sequence:  Enzymatic Nucleic Acid
ttgtagcaggctagctacaacgaacgcaggc

SEQ ID NO: 1818 - DNA, 31 bp, Artificial Sequence
  Definition of Artificial Sequence:  Enzymatic Nucleic Acid
gctcattgggctagctacaacgaagcatacg

SEQ ID NO: 1819 - DNA, 31 bp, Artificial Sequence
  Definition of Artificial Sequence:  Enzymatic Nucleic Acid
agcgtgtgggctagctacaacgaaggcggcc

SEQ ID NO: 1820 - DNA, 31 bp, Artificial Sequence
  Definition of Artificial Sequence:  Enzymatic Nucleic Acid
ggtagaggggctagctacaacgaactgcagg

SEQ ID NO: 1821 - DNA, 31 bp, Artificial Sequence
  Definition of Artificial Sequence:  Enzymatic Nucleic Acid
cctgcaggggctagctacaacgaagaggtac

SEQ ID NO: 1822 - DNA, 31 bp, Artificial Sequence
  Definition of Artificial Sequence:  Enzymatic Nucleic Acid
tggtgcagggctagctacaacgaaggagacg

SEQ ID NO: 1823 - DNA, 31 bp, Artificial Sequence
  Definition of Artificial Sequence:  Enzymatic Nucleic Acid
caaacagaggctagctacaacgaagagtgtc

SEQ ID NO: 1824 - DNA, 31 bp, Artificial Sequence
  Definition of Artificial Sequence:  Enzymatic Nucleic Acid
agcgctgaggctagctacaacgaagattgtt

SEQ ID NO: 1825 - DNA, 31 bp, Artificial Sequence
  Definition of Artificial Sequence:  Enzymatic Nucleic Acid
gcctcaggggctagctacaacgaactgcagg

SEQ ID NO: 1826 - DNA, 31 bp, Artificial Sequence
  Definition of Artificial Sequence:  Enzymatic Nucleic Acid
tgggatggggctagctacaacgaaagggccg

SEQ ID NO: 1827 - DNA, 31 bp, Artificial Sequence
  Definition of Artificial Sequence:  Enzymatic Nucleic Acid
ggctccagggctagctacaacgaactgaggc

SEQ ID NO: 1828 - DNA, 31 bp, Artificial Sequence
  Definition of Artificial Sequence:  Enzymatic Nucleic Acid
aggctgggggctagctacaacgaagggcacc

SEQ ID NO: 1829 - DNA, 31 bp, Artificial Sequence
  Definition of Artificial Sequence:  Enzymatic Nucleic Acid
agcacccaggctagctacaacgagccagcag

SEQ ID NO: 1830 - DNA, 31 bp, Artificial Sequence
  Definition of Artificial Sequence:  Enzymatic Nucleic Acid
cctgggcaggctagctacaacgaggggctgc

SEQ ID NO: 1831 - DNA, 31 bp, Artificial Sequence
  Definition of Artificial Sequence:  Enzymatic Nucleic Acid
agcagggaggctagctacaacgagcccacgg

SEQ ID NO: 1832 - DNA, 31 bp, Artificial Sequence
  Definition of Artificial Sequence:  Enzymatic Nucleic Acid
caggaagaggctagctacaacgagcgctggc

SEQ ID NO: 1833 - DNA, 31 bp, Artificial Sequence
  Definition of Artificial Sequence:  Enzymatic Nucleic Acid
ggttgccgggctagctacaacgagcaggaag

SEQ ID NO: 1834 - DNA, 31 bp, Artificial Sequence; identical to SEQ ID NO: 1833
  Definition of Artificial Sequence:  Enzymatic Nucleic Acid

SEQ ID NO: 1835 - DNA, 31 bp, Artificial Sequence
  Definition of Artificial Sequence:  Enzymatic Nucleic Acid
atgcgagaggctagctacaacgagcggttgc

SEQ ID NO: 1836 - DNA, 31 bp, Artificial Sequence
  Definition of Artificial Sequence:  Enzymatic Nucleic Acid
ctggcacaggctagctacaacgagcgagatg

SEQ ID NO: 1837 - DNA, 31 bp, Artificial Sequence
  Definition of Artificial Sequence:  Enzymatic Nucleic Acid
caggatggggctagctacaacgagaggttgc

SEQ ID NO: 1838 - DNA, 31 bp, Artificial Sequence
  Definition of Artificial Sequence:  Enzymatic Nucleic Acid
ccacaggaggctagctacaacgaggtgaggt

SEQ ID NO: 1839 - DNA, 31 bp, Artificial Sequence
  Definition of Artificial Sequence:  Enzymatic Nucleic Acid
cattcgagggctagctacaacgagcagccac

SEQ ID NO: 1840 - DNA, 31 bp, Artificial Sequence
  Definition of Artificial Sequence:  Enzymatic Nucleic Acid
caggccagggctagctacaacgagaaggcag

SEQ ID NO: 1841 - DNA, 31 bp, Artificial Sequence
  Definition of Artificial Sequence:  Enzymatic Nucleic Acid
cggagctgggctagctacaacgagcattatc

SEQ ID NO: 1842 - DNA, 31 bp, Artificial Sequence
  Definition of Artificial Sequence:  Enzymatic Nucleic Acid
gtggaatgggctagctacaacgaggcagggt

SEQ ID NO: 1843 - DNA, 31 bp, Artificial Sequence
  Definition of Artificial Sequence:  Enzymatic Nucleic Acid
ccgtggaaggctagctacaacgagtggcagg

SEQ ID NO: 1844 - DNA, 31 bp, Artificial Sequence
  Definition of Artificial Sequence:  Enzymatic Nucleic Acid
ccaggccgggctagctacaacgaggaatgtg

SEQ ID NO: 1845 - DNA, 31 bp, Artificial Sequence
  Definition of Artificial Sequence:  Enzymatic Nucleic Acid
gcagcgtgggctagctacaacgagtaggcgg

SEQ ID NO: 1846 - DNA, 31 bp, Artificial Sequence
  Definition of Artificial Sequence:  Enzymatic Nucleic Acid
gtgcagcgggctagctacaacgagtgtaggc

SEQ ID NO: 1847 - DNA, 31 bp, Artificial Sequence
  Definition of Artificial Sequence:  Enzymatic Nucleic Acid
ggtccaggggctagctacaacgagcagcgtg

SEQ ID NO: 1848 - DNA, 31 bp, Artificial Sequence
  Definition of Artificial Sequence:  Enzymatic Nucleic Acid
tcaggcagggctagctacaacgagcctgcag

SEQ ID NO: 1849 - DNA, 31 bp, Artificial Sequence
  Definition of Artificial Sequence:  Enzymatic Nucleic Acid
gcggaaggggctagctacaacgagtcatcag

SEQ ID NO: 1850 - DNA, 31 bp, Artificial Sequence
  Definition of Artificial Sequence:  Enzymatic Nucleic Acid
gaggtgtgggctagctacaacgagaggttgc

SEQ ID NO: 1851 - DNA, 31 bp, Artificial Sequence
  Definition of Artificial Sequence:  Enzymatic Nucleic Acid
aagaggtgggctagctacaacgagtgaggtt

SEQ ID NO: 1852 - DNA, 31 bp, Artificial Sequence
  Definition of Artificial Sequence:  Enzymatic Nucleic Acid
ggaagaggggctagctacaacgagtgtgagg

SEQ ID NO: 1853 - DNA, 31 bp, Artificial Sequence
  Definition of Artificial Sequence:  Enzymatic Nucleic Acid
gctggagaggctagctacaacgagcggttgc

SEQ ID NO: 1854 - DNA, 31 bp, Artificial Sequence
  Definition of Artificial Sequence:  Enzymatic Nucleic Acid
cgaggctgggctagctacaacgagcagccca

SEQ ID NO: 1855 - DNA, 31 bp, Artificial Sequence
  Definition of Artificial Sequence:  Enzymatic Nucleic Acid
ggttctggggctagctacaacgagcagtagg

SEQ ID NO: 1856 - DNA, 31 bp, Artificial Sequence
  Definition of Artificial Sequence:  Enzymatic Nucleic Acid
ggtgcacaggctagctacaacgagggccacg

SEQ ID NO: 1857 - DNA, 31 bp, Artificial Sequence
  Definition of Artificial Sequence:  Enzymatic Nucleic Acid
catgcgggggctagctacaacgagcacatgg

SEQ ID NO: 1858 - DNA, 31 bp, Artificial Sequence
  Definition of Artificial Sequence:  Enzymatic Nucleic Acid
ggaaggcaggctagctacaacgagcgggtgc

SEQ ID NO: 1859 - DNA, 31 bp, Artificial Sequence
  Definition of Artificial Sequence:  Enzymatic Nucleic Acid
gagtgtcaggctagctacaacgagaggcggc

SEQ ID NO: 1860 - DNA, 31 bp, Artificial Sequence
  Definition of Artificial Sequence:  Enzymatic Nucleic Acid
agatagagggctagctacaacgagtcatgag

SEQ ID NO: 1861 - DNA, 31 bp, Artificial Sequence
  Definition of Artificial Sequence:  Enzymatic Nucleic Acid
ggcctcagggctagctacaacgagggcagcg

SEQ ID NO: 1862 - DNA, 31 bp, Artificial Sequence
  Definition of Artificial Sequence:  Enzymatic Nucleic Acid
agtgggcgggctagctacaacgagcccggca

SEQ ID NO: 1863 - DNA, 31 bp, Artificial Sequence
  Definition of Artificial Sequence:  Enzymatic Nucleic Acid
gcccagagggctagctacaacgagggcgtgc

SEQ ID NO: 1864 - DNA, 31 bp, Artificial Sequence
  Definition of Artificial Sequence:  Enzymatic Nucleic Acid
agggccggggctagctacaacgaggccacag

SEQ ID NO: 1865 - DNA, 31 bp, Artificial Sequence
  Definition of Artificial Sequence:  Enzymatic Nucleic Acid
agatgggaggctagctacaacgaggtaaggg

SEQ ID NO: 1866 - DNA, 31 bp, Artificial Sequence
  Definition of Artificial Sequence:  Enzymatic Nucleic Acid
ggtccagaggctagctacaacgagggatggt

SEQ ID NO: 1867 - DNA, 31 bp, Artificial Sequence
  Definition of Artificial Sequence:  Enzymatic Nucleic Acid
ctcatcggggctagctacaacgaggccctgc

SEQ ID NO: 1868 - DNA, 31 bp, Artificial Sequence
  Definition of Artificial Sequence:  Enzymatic Nucleic Acid
atgtgccgggctagctacaacgagggccaga

SEQ ID NO: 1869 - DNA, 31 bp, Artificial Sequence
  Definition of Artificial Sequence:  Enzymatic Nucleic Acid
cattgatgggctagctacaacgagccgtggg

SEQ ID NO: 1870 - DNA, 31 bp, Artificial Sequence
  Definition of Artificial Sequence:  Enzymatic Nucleic Acid
gtcattgaggctagctacaacgagtgccgtg

SEQ ID NO: 1871 - DNA, 31 bp, Artificial Sequence
  Definition of Artificial Sequence:  Enzymatic Nucleic Acid
ccaaagggggctagctacaacgagagtcatt

SEQ ID NO: 1872 - DNA, 31 bp, Artificial Sequence
  Definition of Artificial Sequence:  Enzymatic Nucleic Acid
cactgcagggctagctacaacgagagcgggg

SEQ ID NO: 1873 - DNA, 31 bp, Artificial Sequence
  Definition of Artificial Sequence:  Enzymatic Nucleic Acid
aaccctggggctagctacaacgaggctcgga

SEQ ID NO: 1874 - DNA, 31 bp, Artificial Sequence
  Definition of Artificial Sequence:  Enzymatic Nucleic Acid
gcccgaggggctagctacaacgaggggaacc

SEQ ID NO: 1875 - DNA, 31 bp, Artificial Sequence
  Definition of Artificial Sequence:  Enzymatic Nucleic Acid
ttcttgcgggctagctacaacgagaacagcc

SEQ ID NO: 1876 - DNA, 31 bp, Artificial Sequence
  Definition of Artificial Sequence:  Enzymatic Nucleic Acid
gctgcgggggctagctacaacgagcggttct

SEQ ID NO: 1877 - DNA, 31 bp, Artificial Sequence
  Definition of Artificial Sequence:  Enzymatic Nucleic Acid
gacggcagggctagctacaacgaggctgcgg

SEQ ID NO: 1878 - DNA, 31 bp, Artificial Sequence
  Definition of Artificial Sequence:  Enzymatic Nucleic Acid
gctgcaggggctagctacaacgagaggctgg

SEQ ID NO: 1879 - DNA, 31 bp, Artificial Sequence
  Definition of Artificial Sequence:  Enzymatic Nucleic Acid
caggggggggctagctacaacgagaggctgc

SEQ ID NO: 1880 - DNA, 31 bp, Artificial Sequence
  Definition of Artificial Sequence:  Enzymatic Nucleic Acid
agcggacgggctagctacaacgacctcttca

SEQ ID NO: 1881 - DNA, 31 bp, Artificial Sequence
  Definition of Artificial Sequence:  Enzymatic Nucleic Acid
ccagcggaggctagctacaacgagccctctt

SEQ ID NO: 1882 - DNA, 31 bp, Artificial Sequence
  Definition of Artificial Sequence:  Enzymatic Nucleic Acid
ccctccagggctagctacaacgaggacgccc

SEQ ID NO: 1883 - DNA, 31 bp, Artificial Sequence
  Definition of Artificial Sequence:  Enzymatic Nucleic Acid
gcagccggggctagctacaacgatccctcca

SEQ ID NO: 1884 - DNA, 31 bp, Artificial Sequence
  Definition of Artificial Sequence:  Enzymatic Nucleic Acid
gccagcagggctagctacaacgacggctccc

SEQ ID NO: 1885 - DNA, 31 bp, Artificial Sequence
  Definition of Artificial Sequence:  Enzymatic Nucleic Acid
catgccagggctagctacaacgaagccggct

SEQ ID NO: 1886 - DNA, 31 bp, Artificial Sequence
  Definition of Artificial Sequence:  Enzymatic Nucleic Acid
cacccatgggctagctacaacgacagcagcc

SEQ ID NO: 1887 - DNA, 31 bp, Artificial Sequence
  Definition of Artificial Sequence:  Enzymatic Nucleic Acid
ccacagcaggctagctacaacgaccatgcca

SEQ ID NO: 1888 - DNA, 31 bp, Artificial Sequence
  Definition of Artificial Sequence:  Enzymatic Nucleic Acid
agccacagggctagctacaacgaacccatgc

SEQ ID NO: 1889 - DNA, 31 bp, Artificial Sequence
  Definition of Artificial Sequence:  Enzymatic Nucleic Acid
tgcagccaggctagctacaacgaagcaccca

SEQ ID NO: 1890 - DNA, 31 bp, Artificial Sequence
  Definition of Artificial Sequence:  Enzymatic Nucleic Acid
gcctgcagggctagctacaacgacacagcac

SEQ ID NO: 1891 - DNA, 31 bp, Artificial Sequence
  Definition of Artificial Sequence:  Enzymatic Nucleic Acid
caggcctgggctagctacaacgaagccacag

SEQ ID NO: 1892 - DNA, 31 bp, Artificial Sequence
  Definition of Artificial Sequence:  Enzymatic Nucleic Acid
ctgccaggggctagctacaacgactgcagcc

SEQ ID NO: 1893 - DNA, 31 bp, Artificial Sequence
  Definition of Artificial Sequence:  Enzymatic Nucleic Acid
gccacctgggctagctacaacgacaggcctg

SEQ ID NO: 1894 - DNA, 31 bp, Artificial Sequence
  Definition of Artificial Sequence:  Enzymatic Nucleic Acid
ggctgccaggctagctacaacgactgccagg

SEQ ID NO: 1895 - DNA, 31 bp, Artificial Sequence
  Definition of Artificial Sequence:  Enzymatic Nucleic Acid
tggggctgggctagctacaacgacacctgcc

SEQ ID NO: 1896 - DNA, 31 bp, Artificial Sequence
  Definition of Artificial Sequence:  Enzymatic Nucleic Acid
gcatggggggctagctacaacgatgccacct

SEQ ID NO: 1897 - DNA, 31 bp, Artificial Sequence
  Definition of Artificial Sequence:  Enzymatic Nucleic Acid
cacctgggggctagctacaacgaatggggct

SEQ ID NO: 1898 - DNA, 31 bp, Artificial Sequence
  Definition of Artificial Sequence:  Enzymatic Nucleic Acid
cgcaggcaggctagctacaacgactgggcat

SEQ ID NO: 1899 - DNA, 31 bp, Artificial Sequence
  Definition of Artificial Sequence:  Enzymatic Nucleic Acid
tacgcaggggctagctacaacgaacctgggc

SEQ ID NO: 1900 - DNA, 31 bp, Artificial Sequence
  Definition of Artificial Sequence:  Enzymatic Nucleic Acid
agcatacgggctagctacaacgaaggcacct

SEQ ID NO: 1901 - DNA, 31 bp, Artificial Sequence
  Definition of Artificial Sequence:  Enzymatic Nucleic Acid
gtagcataggctagctacaacgagcaggcac

SEQ ID NO: 1902 - DNA, 31 bp, Artificial Sequence
  Definition of Artificial Sequence:  Enzymatic Nucleic Acid
cattgtagggctagctacaacgaatacgcag

SEQ ID NO: 1903 - DNA, 31 bp, Artificial Sequence
  Definition of Artificial Sequence:  Enzymatic Nucleic Acid
accttgggggctagctacaacgatcattgta

SEQ ID NO: 1904 - DNA, 31 bp, Artificial Sequence
  Definition of Artificial Sequence:  Enzymatic Nucleic Acid
tgtcgtcaggctagctacaacgacttgggct

SEQ ID NO: 1905 - DNA, 31 bp, Artificial Sequence
  Definition of Artificial Sequence:  Enzymatic Nucleic Acid
gggggcagggctagctacaacgattgtcgtc

SEQ ID NO: 1906 - DNA, 31 bp, Artificial Sequence
  Definition of Artificial Sequence:  Enzymatic Nucleic Acid
gctgggggggctagctacaacgaagcttgtc

SEQ ID NO: 1907 - DNA, 31 bp, Artificial Sequence
  Definition of Artificial Sequence:  Enzymatic Nucleic Acid
aggccctgggctagctacaacgatgggggca

SEQ ID NO: 1908 - DNA, 31 bp, Artificial Sequence
  Definition of Artificial Sequence:  Enzymatic Nucleic Acid
cctgcaggggctagctacaacgacctgctgg

SEQ ID NO: 1909 - DNA, 31 bp, Artificial Sequence
  Definition of Artificial Sequence:  Enzymatic Nucleic Acid
acagcctgggctagctacaacgaaggccctg

SEQ ID NO: 1910 - DNA, 31 bp, Artificial Sequence
  Definition of Artificial Sequence:  Enzymatic Nucleic Acid
gggcacagggctagctacaacgactgcaggc

SEQ ID NO: 1911 - DNA, 31 bp, Artificial Sequence
  Definition of Artificial Sequence:  Enzymatic Nucleic Acid
cacgggcaggctagctacaacgaagcctgca

SEQ ID NO: 1912 - DNA, 31 bp, Artificial Sequence
  Definition of Artificial Sequence:  Enzymatic Nucleic Acid
cccacgggggctagctacaacgaacagcctg

SEQ ID NO: 1913 - DNA, 31 bp, Artificial Sequence
  Definition of Artificial Sequence:  Enzymatic Nucleic Acid
gatgcccaggctagctacaacgagggcacag

SEQ ID NO: 1914 - DNA, 31 bp, Artificial Sequence
  Definition of Artificial Sequence:  Enzymatic Nucleic Acid
cagggatgggctagctacaacgaccacgggc

SEQ ID NO: 1915 - DNA, 31 bp, Artificial Sequence
  Definition of Artificial Sequence:  Enzymatic Nucleic Acid
gctggcagggctagctacaacgaagggatgc

SEQ ID NO: 1916 - DNA, 31 bp, Artificial Sequence
  Definition of Artificial Sequence:  Enzymatic Nucleic Acid
ctggctggggctagctacaacgaagcaggga

SEQ ID NO: 1917 - DNA, 31 bp, Artificial Sequence
  Definition of Artificial Sequence:  Enzymatic Nucleic Acid
tgcgctggggctagctacaacgatggcagca

SEQ ID NO: 1918 - DNA, 31 bp, Artificial Sequence
  Definition of Artificial Sequence:  Enzymatic Nucleic Acid
aagatgcgggctagctacaacgatggctggc

SEQ ID NO: 1919 - DNA, 31 bp, Artificial Sequence
  Definition of Artificial Sequence:  Enzymatic Nucleic Acid
ggaagatgggctagctacaacgagctggctg

SEQ ID NO: 1920 - DNA, 31 bp, Artificial Sequence
  Definition of Artificial Sequence:  Enzymatic Nucleic Acid
ttgccgtgggctagctacaacgaaggaagat

SEQ ID NO: 1921 - DNA, 31 bp, Artificial Sequence
  Definition of Artificial Sequence:  Enzymatic Nucleic Acid
tgcggttgggctagctacaacgacgtgcagg

SEQ ID NO: 1922 - DNA, 31 bp, Artificial Sequence; identical to SEQ ID NO: 1921
  Definition of Artificial Sequence:  Enzymatic Nucleic Acid

SEQ ID NO: 1923 - DNA, 31 bp, Artificial Sequence
  Definition of Artificial Sequence:  Enzymatic Nucleic Acid
gcgagatgggctagctacaacgaggttgccg

SEQ ID NO: 1924 - DNA, 31 bp, Artificial Sequence
  Definition of Artificial Sequence:  Enzymatic Nucleic Acid
ggcacatgggctagctacaacgagagatgcg

SEQ ID NO: 1925 - DNA, 31 bp, Artificial Sequence
  Definition of Artificial Sequence:  Enzymatic Nucleic Acid
agctggcaggctagctacaacgaatgcgaga

SEQ ID NO: 1926 - DNA, 31 bp, Artificial Sequence
  Definition of Artificial Sequence:  Enzymatic Nucleic Acid
gcagctggggctagctacaacgaacatgcga

SEQ ID NO: 1927 - DNA, 31 bp, Artificial Sequence
  Definition of Artificial Sequence:  Enzymatic Nucleic Acid
gctggcagggctagctacaacgatggcacat

SEQ ID NO: 1928 - DNA, 31 bp, Artificial Sequence
  Definition of Artificial Sequence:  Enzymatic Nucleic Acid
gaagctggggctagctacaacgaagctggca

SEQ ID NO: 1929 - DNA, 31 bp, Artificial Sequence
  Definition of Artificial Sequence:  Enzymatic Nucleic Acid
cacggaagggctagctacaacgatggcagct

SEQ ID NO: 1930 - DNA, 31 bp, Artificial Sequence
  Definition of Artificial Sequence:  Enzymatic Nucleic Acid
ggcaggcaggctagctacaacgaggaagctg

SEQ ID NO: 1931 - DNA, 31 bp, Artificial Sequence
  Definition of Artificial Sequence:  Enzymatic Nucleic Acid
gcggcaggggctagctacaacgaacggaagc

SEQ ID NO: 1932 - DNA, 31 bp, Artificial Sequence
  Definition of Artificial Sequence:  Enzymatic Nucleic Acid
ggttgcggggctagctacaacgaaggcacgg

SEQ ID NO: 1933 - DNA, 31 bp, Artificial Sequence
  Definition of Artificial Sequence:  Enzymatic Nucleic Acid
tgaggttgggctagctacaacgaggcaggca

SEQ ID NO: 1934 - DNA, 31 bp, Artificial Sequence
  Definition of Artificial Sequence:  Enzymatic Nucleic Acid
tgcagccaggctagctacaacgaaggatggt

SEQ ID NO: 1935 - DNA, 31 bp, Artificial Sequence
  Definition of Artificial Sequence:  Enzymatic Nucleic Acid
gagtgcagggctagctacaacgacacaggat

SEQ ID NO: 1936 - DNA, 31 bp, Artificial Sequence
  Definition of Artificial Sequence:  Enzymatic Nucleic Acid
ttcgagtgggctagctacaacgaagccacag

SEQ ID NO: 1937 - DNA, 31 bp, Artificial Sequence
  Definition of Artificial Sequence:  Enzymatic Nucleic Acid
ggccagcaggctagctacaacgaattcgagt

SEQ ID NO: 1938 - DNA, 31 bp, Artificial Sequence
  Definition of Artificial Sequence:  Enzymatic Nucleic Acid
cgggccagggctagctacaacgaacattcga

SEQ ID NO: 1939 - DNA, 31 bp, Artificial Sequence
  Definition of Artificial Sequence:  Enzymatic Nucleic Acid
aattcgggggctagctacaacgacagcacat

SEQ ID NO: 1940 - DNA, 31 bp, Artificial Sequence
  Definition of Artificial Sequence:  Enzymatic Nucleic Acid
ggcagccgggctagctacaacgaatcaattc

SEQ ID NO: 1941 - DNA, 31 bp, Artificial Sequence
  Definition of Artificial Sequence:  Enzymatic Nucleic Acid
gaaggcagggctagctacaacgacgcatcaa

SEQ ID NO: 1942 - DNA, 31 bp, Artificial Sequence
  Definition of Artificial Sequence:  Enzymatic Nucleic Acid
agtgaaggggctagctacaacgaagccgcat

SEQ ID NO: 1943 - DNA, 31 bp, Artificial Sequence
  Definition of Artificial Sequence:  Enzymatic Nucleic Acid
gggccaggggctagctacaacgacagtgaag

SEQ ID NO: 1944 - DNA, 31 bp, Artificial Sequence
  Definition of Artificial Sequence:  Enzymatic Nucleic Acid
caggagggggctagctacaacgacaggccag

SEQ ID NO: 1945 - DNA, 31 bp, Artificial Sequence
  Definition of Artificial Sequence:  Enzymatic Nucleic Acid
tccagctgggctagctacaacgatccaggag

SEQ ID NO: 1946 - DNA, 31 bp, Artificial Sequence
  Definition of Artificial Sequence:  Enzymatic Nucleic Acid
aggtccagggctagctacaacgatgctccag

SEQ ID NO: 1947 - DNA, 31 bp, Artificial Sequence
  Definition of Artificial Sequence:  Enzymatic Nucleic Acid
cattatcgggctagctacaacgatgaggtcc

SEQ ID NO: 1948 - DNA, 31 bp, Artificial Sequence
  Definition of Artificial Sequence:  Enzymatic Nucleic Acid
gagctgtgggctagctacaacgaattatcgc

SEQ ID NO: 1949 - DNA, 31 bp, Artificial Sequence
  Definition of Artificial Sequence:  Enzymatic Nucleic Acid
gaccggagggctagctacaacgatgtgcatt

SEQ ID NO: 1950 - DNA, 31 bp, Artificial Sequence
  Definition of Artificial Sequence:  Enzymatic Nucleic Acid
tccacagaggctagctacaacgacggagctg

SEQ ID NO: 1951 - DNA, 31 bp, Artificial Sequence
  Definition of Artificial Sequence:  Enzymatic Nucleic Acid
agggtccaggctagctacaacgaagaccgga

SEQ ID NO: 1952 - DNA, 31 bp, Artificial Sequence
  Definition of Artificial Sequence:  Enzymatic Nucleic Acid
gaatgtggggctagctacaacgaagggtcca

SEQ ID NO: 1953 - DNA, 31 bp, Artificial Sequence
  Definition of Artificial Sequence:  Enzymatic Nucleic Acid
ggcccaggggctagctacaacgacgtggaat

SEQ ID NO: 1954 - DNA, 31 bp, Artificial Sequence
  Definition of Artificial Sequence:  Enzymatic Nucleic Acid
gtaggcggggctagctacaacgaccaggccg

SEQ ID NO: 1955 - DNA, 31 bp, Artificial Sequence
  Definition of Artificial Sequence:  Enzymatic Nucleic Acid
tgtgtaggggctagctacaacgaggcccagg

SEQ ID NO: 1956 - DNA, 31 bp, Artificial Sequence
  Definition of Artificial Sequence:  Enzymatic Nucleic Acid
aggtgcagggctagctacaacgagtgtgtag

SEQ ID NO: 1957 - DNA, 31 bp, Artificial Sequence
  Definition of Artificial Sequence:  Enzymatic Nucleic Acid
tccaggtgggctagctacaacgaagcgtgtg

SEQ ID NO: 1958 - DNA, 31 bp, Artificial Sequence
  Definition of Artificial Sequence:  Enzymatic Nucleic Acid
ggccgcagggctagctacaacgaggtccagg

SEQ ID NO: 1959 - DNA, 31 bp, Artificial Sequence
  Definition of Artificial Sequence:  Enzymatic Nucleic Acid
gcaggccgggctagctacaacgaagcggtcc

SEQ ID NO: 1960 - DNA, 31 bp, Artificial Sequence
  Definition of Artificial Sequence:  Enzymatic Nucleic Acid
cctgcaggggctagctacaacgacgcagcgg

SEQ ID NO: 1961 - DNA, 31 bp, Artificial Sequence
  Definition of Artificial Sequence:  Enzymatic Nucleic Acid
agctcctgggctagctacaacgaaggccgca

SEQ ID NO: 1962 - DNA, 31 bp, Artificial Sequence
  Definition of Artificial Sequence:  Enzymatic Nucleic Acid
gggcccagggctagctacaacgatcctgcag

SEQ ID NO: 1963 - DNA, 31 bp, Artificial Sequence
  Definition of Artificial Sequence:  Enzymatic Nucleic Acid
gccccgggggctagctacaacgaccagctcc

SEQ ID NO: 1964 - DNA, 31 bp, Artificial Sequence
  Definition of Artificial Sequence:  Enzymatic Nucleic Acid
cggaacagggctagctacaacgacccgggcc

SEQ ID NO: 1965 - DNA, 31 bp, Artificial Sequence
  Definition of Artificial Sequence:  Enzymatic Nucleic Acid
ccgcggaaggctagctacaacgaagccccgg

SEQ ID NO: 1966 - DNA, 31 bp, Artificial Sequence
  Definition of Artificial Sequence:  Enzymatic Nucleic Acid
ccaggccgggctagctacaacgaggaacagc

SEQ ID NO: 1967 - DNA, 31 bp, Artificial Sequence
  Definition of Artificial Sequence:  Enzymatic Nucleic Acid
cagccaggggctagctacaacgacgcggaac

SEQ ID NO: 1968 - DNA, 31 bp, Artificial Sequence
  Definition of Artificial Sequence:  Enzymatic Nucleic Acid
cagggcagggctagctacaacgacaggccgc

SEQ ID NO: 1969 - DNA, 31 bp, Artificial Sequence
  Definition of Artificial Sequence:  Enzymatic Nucleic Acid
ctgcagggggctagctacaacgaagccaggc

SEQ ID NO: 1970 - DNA, 31 bp, Artificial Sequence
  Definition of Artificial Sequence:  Enzymatic Nucleic Acid
aggtactgggctagctacaacgaagggcagc

SEQ ID NO: 1971 - DNA, 31 bp, Artificial Sequence
  Definition of Artificial Sequence:  Enzymatic Nucleic Acid
tagaggtaggctagctacaacgatgcagggc

SEQ ID NO: 1972 - DNA, 31 bp, Artificial Sequence
  Definition of Artificial Sequence:  Enzymatic Nucleic Acid
ttgtcctgggctagctacaacgaaggtagag

SEQ ID NO: 1973 - DNA, 31 bp, Artificial Sequence
  Definition of Artificial Sequence:  Enzymatic Nucleic Acid
ctgcagcgggctagctacaacgagttgtcct

SEQ ID NO: 1974 - DNA, 31 bp, Artificial Sequence
  Definition of Artificial Sequence:  Enzymatic Nucleic Acid
gcctgcagggctagctacaacgagcgttgtc

SEQ ID NO: 1975 - DNA, 31 bp, Artificial Sequence
  Definition of Artificial Sequence:  Enzymatic Nucleic Acid
agtgcctgggctagctacaacgaagcgcgtt

SEQ ID NO: 1976 - DNA, 31 bp, Artificial Sequence
  Definition of Artificial Sequence:  Enzymatic Nucleic Acid
aggcagtgggctagctacaacgactgcagcg

SEQ ID NO: 1977 - DNA, 31 bp, Artificial Sequence
  Definition of Artificial Sequence:  Enzymatic Nucleic Acid
tcatcaggggctagctacaacgaagtgcctg

SEQ ID NO: 1978 - DNA, 31 bp, Artificial Sequence
  Definition of Artificial Sequence:  Enzymatic Nucleic Acid
ccaggtcgggctagctacaacgaggaaggtg

SEQ ID NO: 1979 - DNA, 31 bp, Artificial Sequence
  Definition of Artificial Sequence:  Enzymatic Nucleic Acid
tgaggttgggctagctacaacgaccaggtcg

SEQ ID NO: 1980 - DNA, 31 bp, Artificial Sequence
  Definition of Artificial Sequence:  Enzymatic Nucleic Acid
ttgccgtgggctagctacaacgaaggaagag

SEQ ID NO: 1981 - DNA, 31 bp, Artificial Sequence
  Definition of Artificial Sequence:  Enzymatic Nucleic Acid
tggagatgggctagctacaacgaggttgccg

SEQ ID NO: 1982 - DNA, 31 bp, Artificial Sequence
  Definition of Artificial Sequence:  Enzymatic Nucleic Acid
cgggcacgggctagctacaacgatggagatg

SEQ ID NO: 1983 - DNA, 31 bp, Artificial Sequence
  Definition of Artificial Sequence:  Enzymatic Nucleic Acid
ctcgggcaggctagctacaacgagctggaga

SEQ ID NO: 1984 - DNA, 31 bp, Artificial Sequence
  Definition of Artificial Sequence:  Enzymatic Nucleic Acid
cgctcgggggctagctacaacgaacgctgga

SEQ ID NO: 1985 - DNA, 31 bp, Artificial Sequence
  Definition of Artificial Sequence:  Enzymatic Nucleic Acid
aaggcgcgggctagctacaacgatcgggcac

SEQ ID NO: 1986 - DNA, 31 bp, Artificial Sequence
  Definition of Artificial Sequence:  Enzymatic Nucleic Acid
ggaaggcgggctagctacaacgagctcgggc

SEQ ID NO: 1987 - DNA, 31 bp, Artificial Sequence
  Definition of Artificial Sequence:  Enzymatic Nucleic Acid
acggaaggggctagctacaacgagcgctcgg

SEQ ID NO: 1988 - DNA, 31 bp, Artificial Sequence
  Definition of Artificial Sequence:  Enzymatic Nucleic Acid
gcagcccaggctagctacaacgaggaaggcg

SEQ ID NO: 1989 - DNA, 31 bp, Artificial Sequence
  Definition of Artificial Sequence:  Enzymatic Nucleic Acid
ctgtgcagggctagctacaacgaccacggaa

SEQ ID NO: 1990 - DNA, 31 bp, Artificial Sequence
  Definition of Artificial Sequence:  Enzymatic Nucleic Acid
aggctgtgggctagctacaacgaagcccacg

SEQ ID NO: 1991 - DNA, 31 bp, Artificial Sequence
  Definition of Artificial Sequence:  Enzymatic Nucleic Acid
ggtcgaggggctagctacaacgatgtgcagc

SEQ ID NO: 1992 - DNA, 31 bp, Artificial Sequence
  Definition of Artificial Sequence:  Enzymatic Nucleic Acid
gtaggagaggctagctacaacgaggtcgagg

SEQ ID NO: 1993 - DNA, 31 bp, Artificial Sequence
  Definition of Artificial Sequence:  Enzymatic Nucleic Acid
ttctggtgggctagctacaacgaagtaggag

SEQ ID NO: 1994 - DNA, 31 bp, Artificial Sequence
  Definition of Artificial Sequence:  Enzymatic Nucleic Acid
gggccacgggctagctacaacgaggttctgg

SEQ ID NO: 1995 - DNA, 31 bp, Artificial Sequence
  Definition of Artificial Sequence:  Enzymatic Nucleic Acid
atgggccaggctagctacaacgagcggttct

SEQ ID NO: 1996 - DNA, 31 bp, Artificial Sequence
  Definition of Artificial Sequence:  Enzymatic Nucleic Acid
cacatgggggctagctacaacgacacgcggt

SEQ ID NO: 1997 - DNA, 31 bp, Artificial Sequence
  Definition of Artificial Sequence:  Enzymatic Nucleic Acid
cgggtgcaggctagctacaacgaatgggcca

SEQ ID NO: 1998 - DNA, 31 bp, Artificial Sequence
  Definition of Artificial Sequence:  Enzymatic Nucleic Acid
tgcgggtgggctagctacaacgaacatgggc

SEQ ID NO: 1999 - DNA, 31 bp, Artificial Sequence
  Definition of Artificial Sequence:  Enzymatic Nucleic Acid
aaggcatgggctagctacaacgagggtgcac

SEQ ID NO: 2000 - DNA, 31 bp, Artificial Sequence
  Definition of Artificial Sequence:  Enzymatic Nucleic Acid
acggaaggggctagctacaacgaatgcgggt

SEQ ID NO: 2001 - DNA, 31 bp, Artificial Sequence
  Definition of Artificial Sequence:  Enzymatic Nucleic Acid
caaggtcaggctagctacaacgaggaaggca

SEQ ID NO: 2002 - DNA, 31 bp, Artificial Sequence
  Definition of Artificial Sequence:  Enzymatic Nucleic Acid
tgaggcggggctagctacaacgacaaggtca

SEQ ID NO: 2003 - DNA, 31 bp, Artificial Sequence
  Definition of Artificial Sequence:  Enzymatic Nucleic Acid
tcatgaggggctagctacaacgaggccaagg

SEQ ID NO: 2004 - DNA, 31 bp, Artificial Sequence
  Definition of Artificial Sequence:  Enzymatic Nucleic Acid
ttggcaaaggctagctacaacgaagatagag

SEQ ID NO: 2005 - DNA, 31 bp, Artificial Sequence
  Definition of Artificial Sequence:  Enzymatic Nucleic Acid
attgttggggctagctacaacgaaaacagat

SEQ ID NO: 2006 - DNA, 31 bp, Artificial Sequence
  Definition of Artificial Sequence:  Enzymatic Nucleic Acid
gggcagcgggctagctacaacgatgatagat

SEQ ID NO: 2007 - DNA, 31 bp, Artificial Sequence
  Definition of Artificial Sequence:  Enzymatic Nucleic Acid
gtgggcagggctagctacaacgagctgatag

SEQ ID NO: 2008 - DNA, 31 bp, Artificial Sequence
  Definition of Artificial Sequence:  Enzymatic Nucleic Acid
tcagtgggggctagctacaacgaagcgctga

SEQ ID NO: 2009 - DNA, 31 bp, Artificial Sequence
  Definition of Artificial Sequence:  Enzymatic Nucleic Acid
ggccagggggctagctacaacgactcagtgg

SEQ ID NO: 2010 - DNA, 31 bp, Artificial Sequence
  Definition of Artificial Sequence:  Enzymatic Nucleic Acid
caggggggggctagctacaacgacagggcct

SEQ ID NO: 2011 - DNA, 31 bp, Artificial Sequence
  Definition of Artificial Sequence:  Enzymatic Nucleic Acid
agggcacgggctagctacaacgaaggggggc

SEQ ID NO: 2012 - DNA, 31 bp, Artificial Sequence
  Definition of Artificial Sequence:  Enzymatic Nucleic Acid
gcagggcaggctagctacaacgagcaggggg

SEQ ID NO: 2013 - DNA, 31 bp, Artificial Sequence
  Definition of Artificial Sequence:  Enzymatic Nucleic Acid
ctgcagggggctagctacaacgaacgcaggg

SEQ ID NO: 2014 - DNA, 31 bp, Artificial Sequence
  Definition of Artificial Sequence:  Enzymatic Nucleic Acid
aggtactgggctagctacaacgaagggcacg

SEQ ID NO: 2015 - DNA, 31 bp, Artificial Sequence
  Definition of Artificial Sequence:  Enzymatic Nucleic Acid
ctcaggtaggctagctacaacgatgcagggc

SEQ ID NO: 2016 - DNA, 31 bp, Artificial Sequence
  Definition of Artificial Sequence:  Enzymatic Nucleic Acid
tcgttgagggctagctacaacgactcaggta

SEQ ID NO: 2017 - DNA, 31 bp, Artificial Sequence
  Definition of Artificial Sequence:  Enzymatic Nucleic Acid
gtcacacaggctagctacaacgaccaggggt

SEQ ID NO: 2018 - DNA, 31 bp, Artificial Sequence
  Definition of Artificial Sequence:  Enzymatic Nucleic Acid
cagtcacaggctagctacaacgaacccaggg

SEQ ID NO: 2019 - DNA, 31 bp, Artificial Sequence
  Definition of Artificial Sequence:  Enzymatic Nucleic Acid
ggcagtcaggctagctacaacgaacacccag

SEQ ID NO: 2020 - DNA, 31 bp, Artificial Sequence
  Definition of Artificial Sequence:  Enzymatic Nucleic Acid
gtgcccggggctagctacaacgaagtcacac

SEQ ID NO: 2021 - DNA, 31 bp, Artificial Sequence
  Definition of Artificial Sequence:  Enzymatic Nucleic Acid
tgggcgtgggctagctacaacgaccggcagt

SEQ ID NO: 2022 - DNA, 31 bp, Artificial Sequence
  Definition of Artificial Sequence:  Enzymatic Nucleic Acid
agagtgggggctagctacaacgagtgcccgg

SEQ ID NO: 2023 - DNA, 31 bp, Artificial Sequence
  Definition of Artificial Sequence:  Enzymatic Nucleic Acid
cagccaggggctagctacaacgaccagagtg

SEQ ID NO: 2024 - DNA, 31 bp, Artificial Sequence
  Definition of Artificial Sequence:  Enzymatic Nucleic Acid
ttctgcagggctagctacaacgacaggccca

SEQ ID NO: 2025 - DNA, 31 bp, Artificial Sequence
  Definition of Artificial Sequence:  Enzymatic Nucleic Acid
aacttctgggctagctacaacgaagccaggc

SEQ ID NO: 2026 - DNA, 31 bp, Artificial Sequence
  Definition of Artificial Sequence:  Enzymatic Nucleic Acid
ccgcggaaggctagctacaacgattctgcag

SEQ ID NO: 2027 - DNA, 31 bp, Artificial Sequence
  Definition of Artificial Sequence:  Enzymatic Nucleic Acid
aggagccgggctagctacaacgaggaacttc

SEQ ID NO: 2028 - DNA, 31 bp, Artificial Sequence
  Definition of Artificial Sequence:  Enzymatic Nucleic Acid
aggaggagggctagctacaacgacgcggaac

SEQ ID NO: 2029 - DNA, 31 bp, Artificial Sequence
  Definition of Artificial Sequence:  Enzymatic Nucleic Acid
gcagggcaggctagctacaacgactcggagg

SEQ ID NO: 2030 - DNA, 31 bp, Artificial Sequence
  Definition of Artificial Sequence:  Enzymatic Nucleic Acid
ctgcagggggctagctacaacgaacctcgga

SEQ ID NO: 2031 - DNA, 31 bp, Artificial Sequence
  Definition of Artificial Sequence:  Enzymatic Nucleic Acid
ggaggctgggctagctacaacgaagggcacc

SEQ ID NO: 2032 - DNA, 31 bp, Artificial Sequence
  Definition of Artificial Sequence:  Enzymatic Nucleic Acid
gcgggaggggctagctacaacgatgcagggc

SEQ ID NO: 2033 - DNA, 31 bp, Artificial Sequence
  Definition of Artificial Sequence:  Enzymatic Nucleic Acid
aggcgttgggctagctacaacgagggaggct

SEQ ID NO: 2034 - DNA, 31 bp, Artificial Sequence
  Definition of Artificial Sequence:  Enzymatic Nucleic Acid
cagccaggggctagctacaacgagttgcggg

SEQ ID NO: 2035 - DNA, 31 bp, Artificial Sequence
  Definition of Artificial Sequence:  Enzymatic Nucleic Acid
acggccagggctagctacaacgacaggcgtt

SEQ ID NO: 2036 - DNA, 31 bp, Artificial Sequence
  Definition of Artificial Sequence:  Enzymatic Nucleic Acid
ggtcacggggctagctacaacgacagccagg

SEQ ID NO: 2037 - DNA, 31 bp, Artificial Sequence
  Definition of Artificial Sequence:  Enzymatic Nucleic Acid
tgaggtcaggctagctacaacgaggccagcc

SEQ ID NO: 2038 - DNA, 31 bp, Artificial Sequence
  Definition of Artificial Sequence:  Enzymatic Nucleic Acid
cagctaggggctagctacaacgagtttgagg

SEQ ID NO: 2039 - DNA, 31 bp, Artificial Sequence
  Definition of Artificial Sequence:  Enzymatic Nucleic Acid
attggcagggctagctacaacgataggcgtt

SEQ ID NO: 2040 - DNA, 31 bp, Artificial Sequence
  Definition of Artificial Sequence:  Enzymatic Nucleic Acid
gtcattggggctagctacaacgaagctaggc

SEQ ID NO: 2041 - DNA, 31 bp, Artificial Sequence
  Definition of Artificial Sequence:  Enzymatic Nucleic Acid
cagccctgggctagctacaacgaaggtcatt

SEQ ID NO: 2042 - DNA, 31 bp, Artificial Sequence
  Definition of Artificial Sequence:  Enzymatic Nucleic Acid
cagcgcagggctagctacaacgacctgcagg

SEQ ID NO: 2043 - DNA, 31 bp, Artificial Sequence
  Definition of Artificial Sequence:  Enzymatic Nucleic Acid
ccacagcgggctagctacaacgaagccctgc

SEQ ID NO: 2044 - DNA, 31 bp, Artificial Sequence
  Definition of Artificial Sequence:  Enzymatic Nucleic Acid
ggccacagggctagctacaacgagcagccct

SEQ ID NO: 2045 - DNA, 31 bp, Artificial Sequence
  Definition of Artificial Sequence:  Enzymatic Nucleic Acid
ggtggccaggctagctacaacgaagcgcagc

SEQ ID NO: 2046 - DNA, 31 bp, Artificial Sequence
  Definition of Artificial Sequence:  Enzymatic Nucleic Acid
gccggtggggctagctacaacgacacagcgc

SEQ ID NO: 2047 - DNA, 31 bp, Artificial Sequence
  Definition of Artificial Sequence:  Enzymatic Nucleic Acid
ggtaagggggctagctacaacgacggtggcc

SEQ ID NO: 2048 - DNA, 31 bp, Artificial Sequence
  Definition of Artificial Sequence:  Enzymatic Nucleic Acid
tggccctgggctagctacaacgacggtccag

SEQ ID NO: 2049 - DNA, 31 bp, Artificial Sequence
  Definition of Artificial Sequence:  Enzymatic Nucleic Acid
atcggtggggctagctacaacgacctgccgg

SEQ ID NO: 2050 - DNA, 31 bp, Artificial Sequence
  Definition of Artificial Sequence:  Enzymatic Nucleic Acid
cccagcggggctagctacaacgatcctcatc

SEQ ID NO: 2051 - DNA, 31 bp, Artificial Sequence
  Definition of Artificial Sequence:  Enzymatic Nucleic Acid
agccccagggctagctacaacgaggctcctc

SEQ ID NO: 2052 - DNA, 31 bp, Artificial Sequence
  Definition of Artificial Sequence:  Enzymatic Nucleic Acid
ttgggaagggctagctacaacgacccagcgg

SEQ ID NO: 2053 - DNA, 31 bp, Artificial Sequence
  Definition of Artificial Sequence:  Enzymatic Nucleic Acid
tggcagcaggctagctacaacgattgggaag

SEQ ID NO: 2054 - DNA, 31 bp, Artificial Sequence
  Definition of Artificial Sequence:  Enzymatic Nucleic Acid
gctggcagggctagctacaacgaacttggga

SEQ ID NO: 2055 - DNA, 31 bp, Artificial Sequence
  Definition of Artificial Sequence:  Enzymatic Nucleic Acid
ctggctggggctagctacaacgaagcacttg

SEQ ID NO: 2056 - DNA, 31 bp, Artificial Sequence
  Definition of Artificial Sequence:  Enzymatic Nucleic Acid
gcatctggggctagctacaacgatggcagca

SEQ ID NO: 2057 - DNA, 31 bp, Artificial Sequence
  Definition of Artificial Sequence:  Enzymatic Nucleic Acid
gtcagcggggctagctacaacgaatctggct

SEQ ID NO: 2058 - DNA, 31 bp, Artificial Sequence
  Definition of Artificial Sequence:  Enzymatic Nucleic Acid
cttgtcagggctagctacaacgaggcatctg

SEQ ID NO: 2059 - DNA, 31 bp, Artificial Sequence
  Definition of Artificial Sequence:  Enzymatic Nucleic Acid
tactgaggggctagctacaacgacttgtcag

SEQ ID NO: 2060 - DNA, 31 bp, Artificial Sequence
  Definition of Artificial Sequence:  Enzymatic Nucleic Acid
ctccagtaggctagctacaacgatgaggcct

SEQ ID NO: 2061 - DNA, 31 bp, Artificial Sequence
  Definition of Artificial Sequence:  Enzymatic Nucleic Acid
cttccaggggctagctacaacgatccagtac

SEQ ID NO: 2062 - DNA, 31 bp, Artificial Sequence
  Definition of Artificial Sequence:  Enzymatic Nucleic Acid
tgccgaagggctagctacaacgatggtcttc

SEQ ID NO: 2063 - DNA, 31 bp, Artificial Sequence
  Definition of Artificial Sequence:  Enzymatic Nucleic Acid
attgcctgggctagctacaacgacgaagctg

SEQ ID NO: 2064 - DNA, 31 bp, Artificial Sequence
  Definition of Artificial Sequence:  Enzymatic Nucleic Acid
gcgcattgggctagctacaacgactgccgaa

SEQ ID NO: 2065 - DNA, 31 bp, Artificial Sequence
  Definition of Artificial Sequence:  Enzymatic Nucleic Acid
cttcagcgggctagctacaacgaattgcctg

SEQ ID NO: 2066 - DNA, 31 bp, Artificial Sequence
  Definition of Artificial Sequence:  Enzymatic Nucleic Acid
cccttcagggctagctacaacgagcattgcc

SEQ ID NO: 2067 - DNA, 31 bp, Artificial Sequence
  Definition of Artificial Sequence:  Enzymatic Nucleic Acid
gcggcacgggctagctacaacgagtcccttc

SEQ ID NO: 2068 - DNA, 31 bp, Artificial Sequence
  Definition of Artificial Sequence:  Enzymatic Nucleic Acid
gggcggcaggctagctacaacgagcgtccct

SEQ ID NO: 2069 - DNA, 31 bp, Artificial Sequence
  Definition of Artificial Sequence:  Enzymatic Nucleic Acid
ccgggcggggctagctacaacgaacgcgtcc

SEQ ID NO: 2070 - DNA, 31 bp, Artificial Sequence
  Definition of Artificial Sequence:  Enzymatic Nucleic Acid
tcaccgggggctagctacaacgaggcacgcg

SEQ ID NO: 2071 - DNA, 31 bp, Artificial Sequence
  Definition of Artificial Sequence:  Enzymatic Nucleic Acid
ggctgtcaggctagctacaacgacgggcggc

SEQ ID NO: 2072 - DNA, 31 bp, Artificial Sequence
  Definition of Artificial Sequence:  Enzymatic Nucleic Acid
ccggcgggggctagctacaacgatgtcaccg

SEQ ID NO: 2073 - DNA, 31 bp, Artificial Sequence
  Definition of Artificial Sequence:  Enzymatic Nucleic Acid
ttgcccggggctagctacaacgagggctgtc

SEQ ID NO: 2074 - DNA, 31 bp, Artificial Sequence
  Definition of Artificial Sequence:  Enzymatic Nucleic Acid
agccgttgggctagctacaacgaccggcggg

SEQ ID NO: 2075 - DNA, 31 bp, Artificial Sequence
  Definition of Artificial Sequence:  Enzymatic Nucleic Acid
ggccagagggctagctacaacgacgttgccc

SEQ ID NO: 2076 - DNA, 31 bp, Artificial Sequence
  Definition of Artificial Sequence:  Enzymatic Nucleic Acid
gccgtgggggctagctacaacgacagagccg

SEQ ID NO: 2077 - DNA, 31 bp, Artificial Sequence
  Definition of Artificial Sequence:  Enzymatic Nucleic Acid
ttgatgtgggctagctacaacgacgtgggcc

SEQ ID NO: 2078 - DNA, 31 bp, Artificial Sequence
  Definition of Artificial Sequence:  Enzymatic Nucleic Acid
gagccaggggctagctacaacgaagagtccc

SEQ ID NO: 2079 - DNA, 31 bp, Artificial Sequence
  Definition of Artificial Sequence:  Enzymatic Nucleic Acid
cagcagagggctagctacaacgacaggcaga

SEQ ID NO: 2080 - DNA, 31 bp, Artificial Sequence
  Definition of Artificial Sequence:  Enzymatic Nucleic Acid
gggctcagggctagctacaacgaagagccag

SEQ ID NO: 2081 - DNA, 31 bp, Artificial Sequence
  Definition of Artificial Sequence:  Enzymatic Nucleic Acid
agcgggggggctagctacaacgatcagcaga

SEQ ID NO: 2082 - DNA, 31 bp, Artificial Sequence
  Definition of Artificial Sequence:  Enzymatic Nucleic Acid
gcagtgagggctagctacaacgagggggctc

SEQ ID NO: 2083 - DNA, 31 bp, Artificial Sequence
  Definition of Artificial Sequence:  Enzymatic Nucleic Acid
ccgcactgggctagctacaacgaagtgagcg

SEQ ID NO: 2084 - DNA, 31 bp, Artificial Sequence
  Definition of Artificial Sequence:  Enzymatic Nucleic Acid
gggccgcaggctagctacaacgatgcagtga

SEQ ID NO: 2085 - DNA, 31 bp, Artificial Sequence
  Definition of Artificial Sequence:  Enzymatic Nucleic Acid
tcgggccgggctagctacaacgaactgcagt

SEQ ID NO: 2086 - DNA, 31 bp, Artificial Sequence
  Definition of Artificial Sequence:  Enzymatic Nucleic Acid
ccctcgggggctagctacaacgacgcactgc

SEQ ID NO: 2087 - DNA, 31 bp, Artificial Sequence
  Definition of Artificial Sequence:  Enzymatic Nucleic Acid
gctcggagggctagctacaacgacctcgggc

SEQ ID NO: 2088 - DNA, 31 bp, Artificial Sequence
  Definition of Artificial Sequence:  Enzymatic Nucleic Acid
cctggtggggctagctacaacgatcggagcc

SEQ ID NO: 2089 - DNA, 31 bp, Artificial Sequence
  Definition of Artificial Sequence:  Enzymatic Nucleic Acid
gtggggaaggctagctacaacgacctggtgg

SEQ ID NO: 2090 - DNA, 31 bp, Artificial Sequence
  Definition of Artificial Sequence:  Enzymatic Nucleic Acid
ggcgagggggctagctacaacgaccgaggtg

SEQ ID NO: 2091 - DNA, 31 bp, Artificial Sequence
  Definition of Artificial Sequence:  Enzymatic Nucleic Acid
gcctccggggctagctacaacgagagggccc

SEQ ID NO: 2092 - DNA, 31 bp, Artificial Sequence
  Definition of Artificial Sequence:  Enzymatic Nucleic Acid
cagcctggggctagctacaacgactccggcg

SEQ ID NO: 2093 - DNA, 31 bp, Artificial Sequence
  Definition of Artificial Sequence:  Enzymatic Nucleic Acid
gtgaacagggctagctacaacgactggcctc

SEQ ID NO: 2094 - DNA, 31 bp, Artificial Sequence
  Definition of Artificial Sequence:  Enzymatic Nucleic Acid
tgcgtgaaggctagctacaacgaagcctggc

SEQ ID NO: 2095 - DNA, 31 bp, Artificial Sequence
  Definition of Artificial Sequence:  Enzymatic Nucleic Acid
ggttcttgggctagctacaacgagtgaacag

SEQ ID NO: 2096 - DNA, 31 bp, Artificial Sequence
  Definition of Artificial Sequence:  Enzymatic Nucleic Acid
tgcgggtgggctagctacaacgaggttcttg

SEQ ID NO: 2097 - DNA, 31 bp, Artificial Sequence
  Definition of Artificial Sequence:  Enzymatic Nucleic Acid
agtggctgggctagctacaacgagggtgcgg

SEQ ID NO: 2098 - DNA, 31 bp, Artificial Sequence
  Definition of Artificial Sequence:  Enzymatic Nucleic Acid
ggcagtggggctagctacaacgatgcgggtg

SEQ ID NO: 2099 - DNA, 31 bp, Artificial Sequence
  Definition of Artificial Sequence:  Enzymatic Nucleic Acid
ccagacggggctagctacaacgaagtggctg

SEQ ID NO: 2100 - DNA, 31 bp, Artificial Sequence
  Definition of Artificial Sequence:  Enzymatic Nucleic Acid
ggcccagaggctagctacaacgaggcagtgg

SEQ ID NO: 2101 - DNA, 31 bp, Artificial Sequence
  Definition of Artificial Sequence:  Enzymatic Nucleic Acid
ctgcctggggctagctacaacgaccagacgg

SEQ ID NO: 2102 - DNA, 31 bp, Artificial Sequence
  Definition of Artificial Sequence:  Enzymatic Nucleic Acid
gctgcctgggctagctacaacgactggccca

SEQ ID NO: 2103 - DNA, 31 bp, Artificial Sequence
  Definition of Artificial Sequence:  Enzymatic Nucleic Acid
ccccgctgggctagctacaacgactgcctgg

SEQ ID NO: 2104 - DNA, 31 bp, Artificial Sequence
  Definition of Artificial Sequence:  Enzymatic Nucleic Acid
cacccccgggctagctacaacgatgcctgcc

SEQ ID NO: 2105 - DNA, 31 bp, Artificial Sequence
  Definition of Artificial Sequence:  Enzymatic Nucleic Acid
tcccgccaggctagctacaacgaccccgctg

SEQ ID NO: 2106 - DNA, 31 bp, Artificial Sequence
  Definition of Artificial Sequence:  Enzymatic Nucleic Acid
cagtcccgggctagctacaacgacacccccg

SEQ ID NO: 2107 - DNA, 31 bp, Artificial Sequence
  Definition of Artificial Sequence:  Enzymatic Nucleic Acid
ctgagtcaggctagctacaacgacagtcccg

SEQ ID NO: 2108 - DNA, 31 bp, Artificial Sequence
  Definition of Artificial Sequence:  Enzymatic Nucleic Acid
cacctgagggctagctacaacgacttctgag

SEQ ID NO: 2109 - DNA, 31 bp, Artificial Sequence
  Definition of Artificial Sequence:  Enzymatic Nucleic Acid
gtagggcaggctagctacaacgactgagcct

SEQ ID NO: 2110 - DNA, 31 bp, Artificial Sequence
  Definition of Artificial Sequence:  Enzymatic Nucleic Acid
gggtagggggctagctacaacgaacctgagc

SEQ ID NO: 2111 - DNA, 31 bp, Artificial Sequence
  Definition of Artificial Sequence:  Enzymatic Nucleic Acid
aggtgaggggctagctacaacgatgggtagg

SEQ ID NO: 2112 - DNA, 31 bp, Artificial Sequence
  Definition of Artificial Sequence:  Enzymatic Nucleic Acid
tgaggctgggctagctacaacgaaggtgagg

SEQ ID NO: 2113 - DNA, 31 bp, Artificial Sequence
  Definition of Artificial Sequence:  Enzymatic Nucleic Acid
gggtgaggggctagctacaacgatgcaggtg

SEQ ID NO: 2114 - DNA, 31 bp, Artificial Sequence
  Definition of Artificial Sequence:  Enzymatic Nucleic Acid
gcgccaggggctagctacaacgaccaggggg

SEQ ID NO: 2115 - DNA, 31 bp, Artificial Sequence
  Definition of Artificial Sequence:  Enzymatic Nucleic Acid
caccagcgggctagctacaacgacaggccca

SEQ ID NO: 2116 - DNA, 31 bp, Artificial Sequence
  Definition of Artificial Sequence:  Enzymatic Nucleic Acid
agcaccagggctagctacaacgagccaggcc

SEQ ID NO: 2117 - DNA, 31 bp, Artificial Sequence
  Definition of Artificial Sequence:  Enzymatic Nucleic Acid
ccacagcaggctagctacaacgacagcgcca

SEQ ID NO: 2118 - DNA, 31 bp, Artificial Sequence
  Definition of Artificial Sequence:  Enzymatic Nucleic Acid
gtccacagggctagctacaacgaaccagcgc

SEQ ID NO: 2119 - DNA, 31 bp, Artificial Sequence
  Definition of Artificial Sequence:  Enzymatic Nucleic Acid
actgtccaggctagctacaacgaagcaccag

SEQ ID NO: 2120 - DNA, 31 bp, Artificial Sequence
  Definition of Artificial Sequence:  Enzymatic Nucleic Acid
cccaagcaggctagctacaacgatgtccaca

SEQ ID NO: 2121 - DNA, 31 bp, Artificial Sequence
  Definition of Artificial Sequence:  Enzymatic Nucleic Acid
ggcccaagggctagctacaacgaactgtcca

SEQ ID NO: 2122 - DNA, 31 bp, Artificial Sequence
  Definition of Artificial Sequence:  Enzymatic Nucleic Acid
cagcagggggctagctacaacgaccaagcac

SEQ ID NO: 2123 - DNA, 31 bp, Artificial Sequence
  Definition of Artificial Sequence:  Enzymatic Nucleic Acid
ggggtcagggctagctacaacgaagggccca

SEQ ID NO: 2124 - DNA, 31 bp, Artificial Sequence
  Definition of Artificial Sequence:  Enzymatic Nucleic Acid
cctcttcaggctagctacaacgacgtagggg

SEQ ID NO: 2125 - DNA, 31 bp, Artificial Sequence
  Definition of Artificial Sequence:  Enzymatic Nucleic Acid
tgggctcaggctagctacaacgatgtagcat

SEQ ID NO: 2126 - DNA, 31 bp, Artificial Sequence
  Definition of Artificial Sequence:  Enzymatic Nucleic Acid
gcttgtcgggctagctacaacgacaccttgg

SEQ ID NO: 2127 - DNA, 31 bp, Artificial Sequence
  Definition of Artificial Sequence:  Enzymatic Nucleic Acid
gcagcttgggctagctacaacgacgtcacct

SEQ ID NO: 2128 - DNA, 31 bp, Artificial Sequence
  Definition of Artificial Sequence:  Enzymatic Nucleic Acid
agatgcggggctagctacaacgatgccgtgc

SEQ ID NO: 2129 - DNA, 31 bp, Artificial Sequence; identical to SEQ ID NO: 2128
  Definition of Artificial Sequence:  Enzymatic Nucleic Acid

SEQ ID NO: 2130 - DNA, 31 bp, Artificial Sequence
  Definition of Artificial Sequence:  Enzymatic Nucleic Acid
tggtgaggggctagctacaacgatgcggcag

SEQ ID NO: 2131 - DNA, 31 bp, Artificial Sequence
  Definition of Artificial Sequence:  Enzymatic Nucleic Acid
ccagcacaggctagctacaacgatcgagtgc

SEQ ID NO: 2132 - DNA, 31 bp, Artificial Sequence
  Definition of Artificial Sequence:  Enzymatic Nucleic Acid
cgcatcaaggctagctacaacgatcgggcca

SEQ ID NO: 2133 - DNA, 31 bp, Artificial Sequence
  Definition of Artificial Sequence:  Enzymatic Nucleic Acid
cagccgcaggctagctacaacgacaattcgg

SEQ ID NO: 2134 - DNA, 31 bp, Artificial Sequence
  Definition of Artificial Sequence:  Enzymatic Nucleic Acid
cgctgaggggctagctacaacgaccagctgc

SEQ ID NO: 2135 - DNA, 31 bp, Artificial Sequence
  Definition of Artificial Sequence:  Enzymatic Nucleic Acid
gtgcattaggctagctacaacgacgctgagg

SEQ ID NO: 2136 - DNA, 31 bp, Artificial Sequence
  Definition of Artificial Sequence:  Enzymatic Nucleic Acid
gctgtgcaggctagctacaacgatatcgctg

SEQ ID NO: 2137 - DNA, 31 bp, Artificial Sequence
  Definition of Artificial Sequence:  Enzymatic Nucleic Acid
tggcagggggctagctacaacgaccacagac

SEQ ID NO: 2138 - DNA, 31 bp, Artificial Sequence
  Definition of Artificial Sequence:  Enzymatic Nucleic Acid
cgcagcggggctagctacaacgaccaggtgc

SEQ ID NO: 2139 - DNA, 31 bp, Artificial Sequence
  Definition of Artificial Sequence:  Enzymatic Nucleic Acid
gcgcgttgggctagctacaacgacctgcagg

SEQ ID NO: 2140 - DNA, 31 bp, Artificial Sequence
  Definition of Artificial Sequence:  Enzymatic Nucleic Acid
gcagcgcgggctagctacaacgatgtcctgc

SEQ ID NO: 2141 - DNA, 31 bp, Artificial Sequence
  Definition of Artificial Sequence:  Enzymatic Nucleic Acid
aggtgtcaggctagctacaacgacaggcagt

SEQ ID NO: 2142 - DNA, 31 bp, Artificial Sequence
  Definition of Artificial Sequence:  Enzymatic Nucleic Acid
ggaaggtgggctagctacaacgacatcaggc

SEQ ID NO: 2143 - DNA, 31 bp, Artificial Sequence
  Definition of Artificial Sequence:  Enzymatic Nucleic Acid
tgcccaggggctagctacaacgacgcggaag

SEQ ID NO: 2144 - DNA, 31 bp, Artificial Sequence
  Definition of Artificial Sequence:  Enzymatic Nucleic Acid
gtgtgaggggctagctacaacgatgcccagg

SEQ ID NO: 2145 - DNA, 31 bp, Artificial Sequence
  Definition of Artificial Sequence:  Enzymatic Nucleic Acid
ggagacggggctagctacaacgacgaggctg

SEQ ID NO: 2146 - DNA, 31 bp, Artificial Sequence
  Definition of Artificial Sequence:  Enzymatic Nucleic Acid
ccacgcggggctagctacaacgatctggtgc

SEQ ID NO: 2147 - DNA, 31 bp, Artificial Sequence
  Definition of Artificial Sequence:  Enzymatic Nucleic Acid
ggccaaggggctagctacaacgacacggaag

SEQ ID NO: 2148 - DNA, 31 bp, Artificial Sequence
  Definition of Artificial Sequence:  Enzymatic Nucleic Acid
atagagtgggctagctacaacgacatgaggc

SEQ ID NO: 2149 - DNA, 31 bp, Artificial Sequence
  Definition of Artificial Sequence:  Enzymatic Nucleic Acid
atagattgggctagctacaacgatggcaaac

SEQ ID NO: 2150 - DNA, 31 bp, Artificial Sequence
  Definition of Artificial Sequence:  Enzymatic Nucleic Acid
ctgatagaggctagctacaacgatgttggca

SEQ ID NO: 2151 - DNA, 31 bp, Artificial Sequence
  Definition of Artificial Sequence:  Enzymatic Nucleic Acid
ggttgtcgggctagctacaacgatgagcctc

SEQ ID NO: 2152 - DNA, 31 bp, Artificial Sequence
  Definition of Artificial Sequence:  Enzymatic Nucleic Acid
aggggttgggctagctacaacgacgttgagc

SEQ ID NO: 2153 - DNA, 31 bp, Artificial Sequence
  Definition of Artificial Sequence:  Enzymatic Nucleic Acid
cccaggggggctagctacaacgatgtcgttg

SEQ ID NO: 2154 - DNA, 31 bp, Artificial Sequence
  Definition of Artificial Sequence:  Enzymatic Nucleic Acid
cccggcagggctagctacaacgacacacacc

SEQ ID NO: 2155 - DNA, 31 bp, Artificial Sequence
  Definition of Artificial Sequence:  Enzymatic Nucleic Acid
gccaggcgggctagctacaacgatgcgggag

SEQ ID NO: 2156 - DNA, 31 bp, Artificial Sequence
  Definition of Artificial Sequence:  Enzymatic Nucleic Acid
gtttgaggggctagctacaacgacacggcca

SEQ ID NO: 2157 - DNA, 31 bp, Artificial Sequence
  Definition of Artificial Sequence:  Enzymatic Nucleic Acid
gctaggcgggctagctacaacgattgaggtc

SEQ ID NO: 2158 - DNA, 31 bp, Artificial Sequence
  Definition of Artificial Sequence:  Enzymatic Nucleic Acid
gcaggtcaggctagctacaacgatggcagct

SEQ ID NO: 2159 - DNA, 31 bp, Artificial Sequence
  Definition of Artificial Sequence:  Enzymatic Nucleic Acid
cctgcaggggctagctacaacgacattggca

SEQ ID NO: 2160 - DNA, 31 bp, Artificial Sequence
  Definition of Artificial Sequence:  Enzymatic Nucleic Acid
cctgccggggctagctacaacgaccagatgg

SEQ ID NO: 2161 - DNA, 31 bp, Artificial Sequence
  Definition of Artificial Sequence:  Enzymatic Nucleic Acid
gctcctcaggctagctacaacgacggtggcc

SEQ ID NO: 2162 - DNA, 31 bp, Artificial Sequence
  Definition of Artificial Sequence:  Enzymatic Nucleic Acid
cagcggcaggctagctacaacgactggctgg

SEQ ID NO: 2163 - DNA, 31 bp, Artificial Sequence
  Definition of Artificial Sequence:  Enzymatic Nucleic Acid
aggccttgggctagctacaacgacagcggca

SEQ ID NO: 2164 - DNA, 31 bp, Artificial Sequence
  Definition of Artificial Sequence:  Enzymatic Nucleic Acid
gaagctggggctagctacaacgacttccagg

SEQ ID NO: 2165 - DNA, 31 bp, Artificial Sequence
  Definition of Artificial Sequence:  Enzymatic Nucleic Acid
tcagcgcaggctagctacaacgatgcctgcc

SEQ ID NO: 2166 - DNA, 31 bp, Artificial Sequence
  Definition of Artificial Sequence:  Enzymatic Nucleic Acid
ggcacgcgggctagctacaacgacccttcag

SEQ ID NO: 2167 - DNA, 31 bp, Artificial Sequence
  Definition of Artificial Sequence:  Enzymatic Nucleic Acid
gcgggctgggctagctacaacgacaccgggc

SEQ ID NO: 2168 - DNA, 31 bp, Artificial Sequence
  Definition of Artificial Sequence:  Enzymatic Nucleic Acid
cagagccgggctagctacaacgatgcccggc

SEQ ID NO: 2169 - DNA, 31 bp, Artificial Sequence
  Definition of Artificial Sequence:  Enzymatic Nucleic Acid
gtgagtcaggctagctacaacgatgatgtgc

SEQ ID NO: 2170 - DNA, 31 bp, Artificial Sequence
  Definition of Artificial Sequence:  Enzymatic Nucleic Acid
agggtgagggctagctacaacgacattgatg

SEQ ID NO: 2171 - DNA, 31 bp, Artificial Sequence
  Definition of Artificial Sequence:  Enzymatic Nucleic Acid
aggcagagggctagctacaacgacccaaagg

SEQ ID NO: 2172 - DNA, 31 bp, Artificial Sequence
  Definition of Artificial Sequence:  Enzymatic Nucleic Acid
gggtgcggggctagctacaacgatcttgcgt

SEQ ID NO: 2173 - DNA, 31 bp, Artificial Sequence
  Definition of Artificial Sequence:  Enzymatic Nucleic Acid
gtcaccagggctagctacaacgacccgccac

SEQ ID NO: 2174 - DNA, 31 bp, Artificial Sequence
  Definition of Artificial Sequence:  Enzymatic Nucleic Acid
cttctgagggctagctacaacgacaccagtc

SEQ ID NO: 2175 - DNA, 31 bp, Artificial Sequence
  Definition of Artificial Sequence:  Enzymatic Nucleic Acid
aagcactgggctagctacaacgaccacagca

SEQ ID NO: 2176 - RNA, 48 nt, Artificial Sequence
  Definition of Artificial Sequence:  Enzymatic Nucleic Acid
agcggacgggaggaaacucccuucaaggacaucguccgggccucuuca

SEQ ID NO: 2177 - RNA, 48 nt, Artificial Sequence
  Definition of Artificial Sequence:  Enzymatic Nucleic Acid
ccagcggaggaggaaacucccuucaaggacaucguccggggcccucuu

SEQ ID NO: 2178 - RNA, 48 nt, Artificial Sequence
  Definition of Artificial Sequence:  Enzymatic Nucleic Acid
cccuccagggaggaaacucccuucaaggacaucguccgggggacgccc

SEQ ID NO: 2179 - RNA, 48 nt, Artificial Sequence
  Definition of Artificial Sequence:  Enzymatic Nucleic Acid
gcagccggggaggaaacucccuucaaggacaucguccgggucccucca

SEQ ID NO: 2180 - RNA, 48 nt, Artificial Sequence
  Definition of Artificial Sequence:  Enzymatic Nucleic Acid
gccagcagggaggaaacucccuucaaggacaucguccgggcggcuccc

SEQ ID NO: 2181 - RNA, 48 nt, Artificial Sequence
  Definition of Artificial Sequence:  Enzymatic Nucleic Acid
caugccagggaggaaacucccuucaaggacaucguccgggagccggcu

SEQ ID NO: 2182 - RNA, 48 nt, Artificial Sequence
  Definition of Artificial Sequence:  Enzymatic Nucleic Acid
cacccaugggaggaaacucccuucaaggacaucguccgggcagcagcc

SEQ ID NO: 2183 - RNA, 48 nt, Artificial Sequence
  Definition of Artificial Sequence:  Enzymatic Nucleic Acid
ccacagcaggaggaaacucccuucaaggacaucguccgggccaugcca

SEQ ID NO: 2184 - RNA, 48 nt, Artificial Sequence
  Definition of Artificial Sequence:  Enzymatic Nucleic Acid
agccacagggaggaaacucccuucaaggacaucguccgggacccaugc

SEQ ID NO: 2185 - RNA, 48 nt, Artificial Sequence
  Definition of Artificial Sequence:  Enzymatic Nucleic Acid
ugcagccaggaggaaacucccuucaaggacaucguccgggagcaccca

SEQ ID NO: 2186 - RNA, 48 nt, Artificial Sequence
  Definition of Artificial Sequence:  Enzymatic Nucleic Acid
gccugcagggaggaaacucccuucaaggacaucguccgggcacagcac

SEQ ID NO: 2187 - RNA, 48 nt, Artificial Sequence
  Definition of Artificial Sequence:  Enzymatic Nucleic Acid
caggccugggaggaaacucccuucaaggacaucguccgggagccacag

SEQ ID NO: 2188 - RNA, 48 nt, Artificial Sequence
  Definition of Artificial Sequence:  Enzymatic Nucleic Acid
cugccaggggaggaaacucccuucaaggacaucguccgggcugcagcc

SEQ ID NO: 2189 - RNA, 48 nt, Artificial Sequence
  Definition of Artificial Sequence:  Enzymatic Nucleic Acid
gccaccugggaggaaacucccuucaaggacaucguccgggcaggccug

SEQ ID NO: 2190 - RNA, 48 nt, Artificial Sequence
  Definition of Artificial Sequence:  Enzymatic Nucleic Acid
ggcugccaggaggaaacucccuucaaggacaucguccgggcugccagg

SEQ ID NO: 2191 - RNA, 48 nt, Artificial Sequence
  Definition of Artificial Sequence:  Enzymatic Nucleic Acid
uggggcugggaggaaacucccuucaaggacaucguccgggcaccugcc

SEQ ID NO: 2192 - RNA, 48 nt, Artificial Sequence
  Definition of Artificial Sequence:  Enzymatic Nucleic Acid
gcauggggggaggaaacucccuucaaggacaucguccgggugccaccu

SEQ ID NO: 2193 - RNA, 48 nt, Artificial Sequence
  Definition of Artificial Sequence:  Enzymatic Nucleic Acid
caccugggggaggaaacucccuucaaggacaucguccgggauggggcu

SEQ ID NO: 2194 - RNA, 48 nt, Artificial Sequence
  Definition of Artificial Sequence:  Enzymatic Nucleic Acid
cgcaggcaggaggaaacucccuucaaggacaucguccgggcugggcau

SEQ ID NO: 2195 - RNA, 48 nt, Artificial Sequence
  Definition of Artificial Sequence:  Enzymatic Nucleic Acid
uacgcaggggaggaaacucccuucaaggacaucguccgggaccugggc

SEQ ID NO: 2196 - RNA, 48 nt, Artificial Sequence
  Definition of Artificial Sequence:  Enzymatic Nucleic Acid
agcauacgggaggaaacucccuucaaggacaucguccgggaggcaccu

SEQ ID NO: 2197 - RNA, 48 nt, Artificial Sequence
  Definition of Artificial Sequence:  Enzymatic Nucleic Acid
guagcauaggaggaaacucccuucaaggacaucguccggggcaggcac

SEQ ID NO: 2198 - RNA, 48 nt, Artificial Sequence
  Definition of Artificial Sequence:  Enzymatic Nucleic Acid
cauuguagggaggaaacucccuucaaggacaucguccgggauacgcag

SEQ ID NO: 2199 - RNA, 48 nt, Artificial Sequence
  Definition of Artificial Sequence:  Enzymatic Nucleic Acid
accuugggggaggaaacucccuucaaggacaucguccgggucauugua

SEQ ID NO: 2200 - RNA, 48 nt, Artificial Sequence
  Definition of Artificial Sequence:  Enzymatic Nucleic Acid
ugucgucaggaggaaacucccuucaaggacaucguccgggcuugggcu

SEQ ID NO: 2201 - RNA, 48 nt, Artificial Sequence
  Definition of Artificial Sequence:  Enzymatic Nucleic Acid
gggggcagggaggaaacucccuucaaggacaucguccggguugucguc

SEQ ID NO: 2202 - RNA, 48 nt, Artificial Sequence
  Definition of Artificial Sequence:  Enzymatic Nucleic Acid
gcugggggggaggaaacucccuucaaggacaucguccgggagcuuguc

SEQ ID NO: 2203 - RNA, 48 nt, Artificial Sequence
  Definition of Artificial Sequence:  Enzymatic Nucleic Acid
aggcccugggaggaaacucccuucaaggacaucguccgggugggggca

SEQ ID NO: 2204 - RNA, 48 nt, Artificial Sequence
  Definition of Artificial Sequence:  Enzymatic Nucleic Acid
ccugcaggggaggaaacucccuucaaggacaucguccgggccugcugg

SEQ ID NO: 2205 - RNA, 48 nt, Artificial Sequence
  Definition of Artificial Sequence:  Enzymatic Nucleic Acid
acagccugggaggaaacucccuucaaggacaucguccgggaggcccug

SEQ ID NO: 2206 - RNA, 48 nt, Artificial Sequence
  Definition of Artificial Sequence:  Enzymatic Nucleic Acid
gggcacagggaggaaacucccuucaaggacaucguccgggcugcaggc

SEQ ID NO: 2207 - RNA, 48 nt, Artificial Sequence
  Definition of Artificial Sequence:  Enzymatic Nucleic Acid
cacgggcaggaggaaacucccuucaaggacaucguccgggagccugca

SEQ ID NO: 2208 - RNA, 48 nt, Artificial Sequence
  Definition of Artificial Sequence:  Enzymatic Nucleic Acid
cccacgggggaggaaacucccuucaaggacaucguccgggacagccug

SEQ ID NO: 2209 - RNA, 48 nt, Artificial Sequence
  Definition of Artificial Sequence:  Enzymatic Nucleic Acid
gaugcccaggaggaaacucccuucaaggacaucguccggggggcacag

SEQ ID NO: 2210 - RNA, 48 nt, Artificial Sequence
  Definition of Artificial Sequence:  Enzymatic Nucleic Acid
cagggaugggaggaaacucccuucaaggacaucguccgggccacgggc

SEQ ID NO: 2211 - RNA, 48 nt, Artificial Sequence
  Definition of Artificial Sequence:  Enzymatic Nucleic Acid
gcuggcagggaggaaacucccuucaaggacaucguccgggagggaugc

SEQ ID NO: 2212 - RNA, 48 nt, Artificial Sequence
  Definition of Artificial Sequence:  Enzymatic Nucleic Acid
cuggcuggggaggaaacucccuucaaggacaucguccgggagcaggga

SEQ ID NO: 2213 - RNA, 48 nt, Artificial Sequence
  Definition of Artificial Sequence:  Enzymatic Nucleic Acid
ugcgcuggggaggaaacucccuucaaggacaucguccggguggcagca

SEQ ID NO: 2214 - RNA, 48 nt, Artificial Sequence
  Definition of Artificial Sequence:  Enzymatic Nucleic Acid
aagaugcgggaggaaacucccuucaaggacaucguccggguggcuggc

SEQ ID NO: 2215 - RNA, 48 nt, Artificial Sequence
  Definition of Artificial Sequence:  Enzymatic Nucleic Acid
ggaagaugggaggaaacucccuucaaggacaucguccggggcuggcug

SEQ ID NO: 2216 - RNA, 48 nt, Artificial Sequence
  Definition of Artificial Sequence:  Enzymatic Nucleic Acid
uugccgugggaggaaacucccuucaaggacaucguccgggaggaagau

SEQ ID NO: 2217 - RNA, 48 nt, Artificial Sequence
  Definition of Artificial Sequence:  Enzymatic Nucleic Acid
ugcgguugggaggaaacucccuucaaggacaucguccgggcgugcagg

SEQ ID NO: 2218 - RNA, 48 nt, Artificial Sequence; identical to SEQ ID NO: 2217
  Definition of Artificial Sequence:  Enzymatic Nucleic Acid

SEQ ID NO: 2219 - RNA, 48 nt, Artificial Sequence
  Definition of Artificial Sequence:  Enzymatic Nucleic Acid
gcgagaugggaggaaacucccuucaaggacaucguccggggguugccg

SEQ ID NO: 2220 - RNA, 48 nt, Artificial Sequence
  Definition of Artificial Sequence:  Enzymatic Nucleic Acid
ggcacaugggaggaaacucccuucaaggacaucguccggggagaugcg

SEQ ID NO: 2221 - RNA, 48 nt, Artificial Sequence
  Definition of Artificial Sequence:  Enzymatic Nucleic Acid
agcuggcaggaggaaacucccuucaaggacaucguccgggaugcgaga

SEQ ID NO: 2222 - RNA, 48 nt, Artificial Sequence
  Definition of Artificial Sequence:  Enzymatic Nucleic Acid
gcagcuggggaggaaacucccuucaaggacaucguccgggacaugcga

SEQ ID NO: 2223 - RNA, 48 nt, Artificial Sequence
  Definition of Artificial Sequence:  Enzymatic Nucleic Acid
gcuggcagggaggaaacucccuucaaggacaucguccggguggcacau

SEQ ID NO: 2224 - RNA, 48 nt, Artificial Sequence
  Definition of Artificial Sequence:  Enzymatic Nucleic Acid
gaagcuggggaggaaacucccuucaaggacaucguccgggagcuggca

SEQ ID NO: 2225 - RNA, 48 nt, Artificial Sequence
  Definition of Artificial Sequence:  Enzymatic Nucleic Acid
cacggaagggaggaaacucccuucaaggacaucguccggguggcagcu

SEQ ID NO: 2226 - RNA, 48 nt, Artificial Sequence
  Definition of Artificial Sequence:  Enzymatic Nucleic Acid
ggcaggcaggaggaaacucccuucaaggacaucguccgggggaagcug

SEQ ID NO: 2227 - RNA, 48 nt, Artificial Sequence
  Definition of Artificial Sequence:  Enzymatic Nucleic Acid
gcggcaggggaggaaacucccuucaaggacaucguccgggacggaagc

SEQ ID NO: 2228 - RNA, 48 nt, Artificial Sequence
  Definition of Artificial Sequence:  Enzymatic Nucleic Acid
gguugcggggaggaaacucccuucaaggacaucguccgggaggcacgg

SEQ ID NO: 2229 - RNA, 48 nt, Artificial Sequence
  Definition of Artificial Sequence:  Enzymatic Nucleic Acid
ugagguugggaggaaacucccuucaaggacaucguccgggggcaggca

SEQ ID NO: 2230 - RNA, 48 nt, Artificial Sequence
  Definition of Artificial Sequence:  Enzymatic Nucleic Acid
ugcagccaggaggaaacucccuucaaggacaucguccgggaggauggu

SEQ ID NO: 2231 - RNA, 48 nt, Artificial Sequence
  Definition of Artificial Sequence:  Enzymatic Nucleic Acid
gagugcagggaggaaacucccuucaaggacaucguccgggcacaggau

SEQ ID NO: 2232 - RNA, 48 nt, Artificial Sequence
  Definition of Artificial Sequence:  Enzymatic Nucleic Acid
uucgagugggaggaaacucccuucaaggacaucguccgggagccacag

SEQ ID NO: 2233 - RNA, 48 nt, Artificial Sequence
  Definition of Artificial Sequence:  Enzymatic Nucleic Acid
ggccagcaggaggaaacucccuucaaggacaucguccgggauucgagu

SEQ ID NO: 2234 - RNA, 48 nt, Artificial Sequence
  Definition of Artificial Sequence:  Enzymatic Nucleic Acid
cgggccagggaggaaacucccuucaaggacaucguccgggacauucga

SEQ ID NO: 2235 - RNA, 48 nt, Artificial Sequence
  Definition of Artificial Sequence:  Enzymatic Nucleic Acid
aauucgggggaggaaacucccuucaaggacaucguccgggcagcacau

SEQ ID NO: 2236 - RNA, 48 nt, Artificial Sequence
  Definition of Artificial Sequence:  Enzymatic Nucleic Acid
ggcagccgggaggaaacucccuucaaggacaucguccgggaucaauuc

SEQ ID NO: 2237 - RNA, 48 nt, Artificial Sequence
  Definition of Artificial Sequence:  Enzymatic Nucleic Acid
gaaggcagggaggaaacucccuucaaggacaucguccgggcgcaucaa

SEQ ID NO: 2238 - RNA, 48 nt, Artificial Sequence
  Definition of Artificial Sequence:  Enzymatic Nucleic Acid
agugaaggggaggaaacucccuucaaggacaucguccgggagccgcau

SEQ ID NO: 2239 - RNA, 48 nt, Artificial Sequence
  Definition of Artificial Sequence:  Enzymatic Nucleic Acid
gggccaggggaggaaacucccuucaaggacaucguccgggcagugaag

SEQ ID NO: 2240 - RNA, 48 nt, Artificial Sequence
  Definition of Artificial Sequence:  Enzymatic Nucleic Acid
caggagggggaggaaacucccuucaaggacaucguccgggcaggccag

SEQ ID NO: 2241 - RNA, 48 nt, Artificial Sequence
  Definition of Artificial Sequence:  Enzymatic Nucleic Acid
uccagcugggaggaaacucccuucaaggacaucguccggguccaggag

SEQ ID NO: 2242 - RNA, 48 nt, Artificial Sequence
  Definition of Artificial Sequence:  Enzymatic Nucleic Acid
agguccagggaggaaacucccuucaaggacaucguccgggugcuccag

SEQ ID NO: 2243 - RNA, 48 nt, Artificial Sequence
  Definition of Artificial Sequence:  Enzymatic Nucleic Acid
cauuaucgggaggaaacucccuucaaggacaucguccgggugaggucc

SEQ ID NO: 2244 - RNA, 48 nt, Artificial Sequence
  Definition of Artificial Sequence:  Enzymatic Nucleic Acid
gagcugugggaggaaacucccuucaaggacaucguccgggauuaucgc

SEQ ID NO: 2245 - RNA, 48 nt, Artificial Sequence
  Definition of Artificial Sequence:  Enzymatic Nucleic Acid
gaccggagggaggaaacucccuucaaggacaucguccgggugugcauu

SEQ ID NO: 2246 - RNA, 48 nt, Artificial Sequence
  Definition of Artificial Sequence:  Enzymatic Nucleic Acid
uccacagaggaggaaacucccuucaaggacaucguccgggcggagcug

SEQ ID NO: 2247 - RNA, 48 nt, Artificial Sequence
  Definition of Artificial Sequence:  Enzymatic Nucleic Acid
aggguccaggaggaaacucccuucaaggacaucguccgggagaccgga

SEQ ID NO: 2248 - RNA, 48 nt, Artificial Sequence
  Definition of Artificial Sequence:  Enzymatic Nucleic Acid
gaauguggggaggaaacucccuucaaggacaucguccgggagggucca

SEQ ID NO: 2249 - RNA, 48 nt, Artificial Sequence
  Definition of Artificial Sequence:  Enzymatic Nucleic Acid
ggcccaggggaggaaacucccuucaaggacaucguccgggcguggaau

SEQ ID NO: 2250 - RNA, 48 nt, Artificial Sequence
  Definition of Artificial Sequence:  Enzymatic Nucleic Acid
guaggcggggaggaaacucccuucaaggacaucguccgggccaggccg

SEQ ID NO: 2251 - RNA, 48 nt, Artificial Sequence
  Definition of Artificial Sequence:  Enzymatic Nucleic Acid
uguguaggggaggaaacucccuucaaggacaucguccgggggcccagg

SEQ ID NO: 2252 - RNA, 48 nt, Artificial Sequence
  Definition of Artificial Sequence:  Enzymatic Nucleic Acid
aggugcagggaggaaacucccuucaaggacaucguccgggguguguag

SEQ ID NO: 2253 - RNA, 48 nt, Artificial Sequence
  Definition of Artificial Sequence:  Enzymatic Nucleic Acid
uccaggugggaggaaacucccuucaaggacaucguccgggagcgugug

SEQ ID NO: 2254 - RNA, 48 nt, Artificial Sequence
  Definition of Artificial Sequence:  Enzymatic Nucleic Acid
ggccgcagggaggaaacucccuucaaggacaucguccggggguccagg

SEQ ID NO: 2255 - RNA, 48 nt, Artificial Sequence
  Definition of Artificial Sequence:  Enzymatic Nucleic Acid
gcaggccgggaggaaacucccuucaaggacaucguccgggagcggucc

SEQ ID NO: 2256 - RNA, 48 nt, Artificial Sequence
  Definition of Artificial Sequence:  Enzymatic Nucleic Acid
ccugcaggggaggaaacucccuucaaggacaucguccgggcgcagcgg

SEQ ID NO: 2257 - RNA, 48 nt, Artificial Sequence
  Definition of Artificial Sequence:  Enzymatic Nucleic Acid
agcuccugggaggaaacucccuucaaggacaucguccgggaggccgca

SEQ ID NO: 2258 - RNA, 48 nt, Artificial Sequence
  Definition of Artificial Sequence:  Enzymatic Nucleic Acid
gggcccagggaggaaacucccuucaaggacaucguccggguccugcag

SEQ ID NO: 2259 - RNA, 48 nt, Artificial Sequence
  Definition of Artificial Sequence:  Enzymatic Nucleic Acid
gccccgggggaggaaacucccuucaaggacaucguccgggccagcucc

SEQ ID NO: 2260 - RNA, 48 nt, Artificial Sequence
  Definition of Artificial Sequence:  Enzymatic Nucleic Acid
cggaacagggaggaaacucccuucaaggacaucguccgggcccgggcc

SEQ ID NO: 2261 - RNA, 48 nt, Artificial Sequence
  Definition of Artificial Sequence:  Enzymatic Nucleic Acid
ccgcggaaggaggaaacucccuucaaggacaucguccgggagccccgg

SEQ ID NO: 2262 - RNA, 48 nt, Artificial Sequence
  Definition of Artificial Sequence:  Enzymatic Nucleic Acid
ccaggccgggaggaaacucccuucaaggacaucguccgggggaacagc

SEQ ID NO: 2263 - RNA, 48 nt, Artificial Sequence
  Definition of Artificial Sequence:  Enzymatic Nucleic Acid
cagccaggggaggaaacucccuucaaggacaucguccgggcgcggaac

SEQ ID NO: 2264 - RNA, 48 nt, Artificial Sequence
  Definition of Artificial Sequence:  Enzymatic Nucleic Acid
cagggcagggaggaaacucccuucaaggacaucguccgggcaggccgc

SEQ ID NO: 2265 - RNA, 48 nt, Artificial Sequence
  Definition of Artificial Sequence:  Enzymatic Nucleic Acid
cugcagggggaggaaacucccuucaaggacaucguccgggagccaggc

SEQ ID NO: 2266 - RNA, 48 nt, Artificial Sequence
  Definition of Artificial Sequence:  Enzymatic Nucleic Acid
agguacugggaggaaacucccuucaaggacaucguccgggagggcagc

SEQ ID NO: 2267 - RNA, 48 nt, Artificial Sequence
  Definition of Artificial Sequence:  Enzymatic Nucleic Acid
uagagguaggaggaaacucccuucaaggacaucguccgggugcagggc

SEQ ID NO: 2268 - RNA, 48 nt, Artificial Sequence
  Definition of Artificial Sequence:  Enzymatic Nucleic Acid
uuguccugggaggaaacucccuucaaggacaucguccgggagguagag

SEQ ID NO: 2269 - RNA, 48 nt, Artificial Sequence
  Definition of Artificial Sequence:  Enzymatic Nucleic Acid
cugcagcgggaggaaacucccuucaaggacaucguccgggguuguccu

SEQ ID NO: 2270 - RNA, 48 nt, Artificial Sequence
  Definition of Artificial Sequence:  Enzymatic Nucleic Acid
gccugcagggaggaaacucccuucaaggacaucguccggggcguuguc

SEQ ID NO: 2271 - RNA, 48 nt, Artificial Sequence
  Definition of Artificial Sequence:  Enzymatic Nucleic Acid
agugccugggaggaaacucccuucaaggacaucguccgggagcgcguu

SEQ ID NO: 2272 - RNA, 48 nt, Artificial Sequence
  Definition of Artificial Sequence:  Enzymatic Nucleic Acid
aggcagugggaggaaacucccuucaaggacaucguccgggcugcagcg

SEQ ID NO: 2273 - RNA, 48 nt, Artificial Sequence
  Definition of Artificial Sequence:  Enzymatic Nucleic Acid
ucaucaggggaggaaacucccuucaaggacaucguccgggagugccug

SEQ ID NO: 2274 - RNA, 48 nt, Artificial Sequence
  Definition of Artificial Sequence:  Enzymatic Nucleic Acid
ccaggucgggaggaaacucccuucaaggacaucguccgggggaaggug

SEQ ID NO: 2275 - RNA, 48 nt, Artificial Sequence
  Definition of Artificial Sequence:  Enzymatic Nucleic Acid
ugagguugggaggaaacucccuucaaggacaucguccgggccaggucg

SEQ ID NO: 2276 - RNA, 48 nt, Artificial Sequence
  Definition of Artificial Sequence:  Enzymatic Nucleic Acid
uugccgugggaggaaacucccuucaaggacaucguccgggaggaagag

SEQ ID NO: 2277 - RNA, 48 nt, Artificial Sequence
  Definition of Artificial Sequence:  Enzymatic Nucleic Acid
uggagaugggaggaaacucccuucaaggacaucguccggggguugccg

SEQ ID NO: 2278 - RNA, 48 nt, Artificial Sequence
  Definition of Artificial Sequence:  Enzymatic Nucleic Acid
cgggcacgggaggaaacucccuucaaggacaucguccggguggagaug

SEQ ID NO: 2279 - RNA, 48 nt, Artificial Sequence
  Definition of Artificial Sequence:  Enzymatic Nucleic Acid
cucgggcaggaggaaacucccuucaaggacaucguccggggcuggaga

SEQ ID NO: 2280 - RNA, 48 nt, Artificial Sequence
  Definition of Artificial Sequence:  Enzymatic Nucleic Acid
cgcucgggggaggaaacucccuucaaggacaucguccgggacgcugga

SEQ ID NO: 2281 - RNA, 48 nt, Artificial Sequence
  Definition of Artificial Sequence:  Enzymatic Nucleic Acid
aaggcgcgggaggaaacucccuucaaggacaucguccgggucgggcac

SEQ ID NO: 2282 - RNA, 48 nt, Artificial Sequence
  Definition of Artificial Sequence:  Enzymatic Nucleic Acid
ggaaggcgggaggaaacucccuucaaggacaucguccggggcucgggc

SEQ ID NO: 2283 - RNA, 48 nt, Artificial Sequence
  Definition of Artificial Sequence:  Enzymatic Nucleic Acid
acggaaggggaggaaacucccuucaaggacaucguccggggcgcucgg

SEQ ID NO: 2284 - RNA, 48 nt, Artificial Sequence
  Definition of Artificial Sequence:  Enzymatic Nucleic Acid
gcagcccaggaggaaacucccuucaaggacaucguccgggggaaggcg

SEQ ID NO: 2285 - RNA, 48 nt, Artificial Sequence
  Definition of Artificial Sequence:  Enzymatic Nucleic Acid
cugugcagggaggaaacucccuucaaggacaucguccgggccacggaa

SEQ ID NO: 2286 - RNA, 48 nt, Artificial Sequence
  Definition of Artificial Sequence:  Enzymatic Nucleic Acid
aggcugugggaggaaacucccuucaaggacaucguccgggagcccacg

SEQ ID NO: 2287 - RNA, 48 nt, Artificial Sequence
  Definition of Artificial Sequence:  Enzymatic Nucleic Acid
ggucgaggggaggaaacucccuucaaggacaucguccgggugugcagc

SEQ ID NO: 2288 - RNA, 48 nt, Artificial Sequence
  Definition of Artificial Sequence:  Enzymatic Nucleic Acid
guaggagaggaggaaacucccuucaaggacaucguccgggggucgagg

SEQ ID NO: 2289 - RNA, 48 nt, Artificial Sequence
  Definition of Artificial Sequence:  Enzymatic Nucleic Acid
uucuggugggaggaaacucccuucaaggacaucguccgggaguaggag

SEQ ID NO: 2290 - RNA, 48 nt, Artificial Sequence
  Definition of Artificial Sequence:  Enzymatic Nucleic Acid
gggccacgggaggaaacucccuucaaggacaucguccggggguucugg

SEQ ID NO: 2291 - RNA, 48 nt, Artificial Sequence
  Definition of Artificial Sequence:  Enzymatic Nucleic Acid
augggccaggaggaaacucccuucaaggacaucguccggggcgguucu

SEQ ID NO: 2292 - RNA, 48 nt, Artificial Sequence
  Definition of Artificial Sequence:  Enzymatic Nucleic Acid
cacaugggggaggaaacucccuucaaggacaucguccgggcacgcggu

SEQ ID NO: 2293 - RNA, 48 nt, Artificial Sequence
  Definition of Artificial Sequence:  Enzymatic Nucleic Acid
cgggugcaggaggaaacucccuucaaggacaucguccgggaugggcca

SEQ ID NO: 2294 - RNA, 48 nt, Artificial Sequence
  Definition of Artificial Sequence:  Enzymatic Nucleic Acid
ugcgggugggaggaaacucccuucaaggacaucguccgggacaugggc

SEQ ID NO: 2295 - RNA, 48 nt, Artificial Sequence
  Definition of Artificial Sequence:  Enzymatic Nucleic Acid
aaggcaugggaggaaacucccuucaaggacaucguccggggggugcac

SEQ ID NO: 2296 - RNA, 48 nt, Artificial Sequence
  Definition of Artificial Sequence:  Enzymatic Nucleic Acid
acggaaggggaggaaacucccuucaaggacaucguccgggaugcgggu

SEQ ID NO: 2297 - RNA, 48 nt, Artificial Sequence
  Definition of Artificial Sequence:  Enzymatic Nucleic Acid
caaggucaggaggaaacucccuucaaggacaucguccgggggaaggca

SEQ ID NO: 2298 - RNA, 48 nt, Artificial Sequence
  Definition of Artificial Sequence:  Enzymatic Nucleic Acid
ugaggcggggaggaaacucccuucaaggacaucguccgggcaagguca

SEQ ID NO: 2299 - RNA, 48 nt, Artificial Sequence
  Definition of Artificial Sequence:  Enzymatic Nucleic Acid
ucaugaggggaggaaacucccuucaaggacaucguccgggggccaagg

SEQ ID NO: 2300 - RNA, 48 nt, Artificial Sequence
  Definition of Artificial Sequence:  Enzymatic Nucleic Acid
uuggcaaaggaggaaacucccuucaaggacaucguccgggagauagag

SEQ ID NO: 2301 - RNA, 48 nt, Artificial Sequence
  Definition of Artificial Sequence:  Enzymatic Nucleic Acid
auuguuggggaggaaacucccuucaaggacaucguccgggaaacagau

SEQ ID NO: 2302 - RNA, 48 nt, Artificial Sequence
  Definition of Artificial Sequence:  Enzymatic Nucleic Acid
gggcagcgggaggaaacucccuucaaggacaucguccgggugauagau

SEQ ID NO: 2303 - RNA, 48 nt, Artificial Sequence
  Definition of Artificial Sequence:  Enzymatic Nucleic Acid
gugggcagggaggaaacucccuucaaggacaucguccggggcugauag

SEQ ID NO: 2304 - RNA, 48 nt, Artificial Sequence
  Definition of Artificial Sequence:  Enzymatic Nucleic Acid
ucagugggggaggaaacucccuucaaggacaucguccgggagcgcuga

SEQ ID NO: 2305 - RNA, 48 nt, Artificial Sequence
  Definition of Artificial Sequence:  Enzymatic Nucleic Acid
ggccagggggaggaaacucccuucaaggacaucguccgggcucagugg

SEQ ID NO: 2306 - RNA, 48 nt, Artificial Sequence
  Definition of Artificial Sequence:  Enzymatic Nucleic Acid
caggggggggaggaaacucccuucaaggacaucguccgggcagggccu

SEQ ID NO: 2307 - RNA, 48 nt, Artificial Sequence
  Definition of Artificial Sequence:  Enzymatic Nucleic Acid
agggcacgggaggaaacucccuucaaggacaucguccgggaggggggc

SEQ ID NO: 2308 - RNA, 48 nt, Artificial Sequence
  Definition of Artificial Sequence:  Enzymatic Nucleic Acid
gcagggcaggaggaaacucccuucaaggacaucguccggggcaggggg

SEQ ID NO: 2309 - RNA, 48 nt, Artificial Sequence
  Definition of Artificial Sequence:  Enzymatic Nucleic Acid
cugcagggggaggaaacucccuucaaggacaucguccgggacgcaggg

SEQ ID NO: 2310 - RNA, 48 nt, Artificial Sequence
  Definition of Artificial Sequence:  Enzymatic Nucleic Acid
agguacugggaggaaacucccuucaaggacaucguccgggagggcacg

SEQ ID NO: 2311 - RNA, 48 nt, Artificial Sequence
  Definition of Artificial Sequence:  Enzymatic Nucleic Acid
cucagguaggaggaaacucccuucaaggacaucguccgggugcagggc

SEQ ID NO: 2312 - RNA, 48 nt, Artificial Sequence
  Definition of Artificial Sequence:  Enzymatic Nucleic Acid
ucguugagggaggaaacucccuucaaggacaucguccgggcucaggua

SEQ ID NO: 2313 - RNA, 48 nt, Artificial Sequence
  Definition of Artificial Sequence:  Enzymatic Nucleic Acid
gucacacaggaggaaacucccuucaaggacaucguccgggccaggggu

SEQ ID NO: 2314 - RNA, 48 nt, Artificial Sequence
  Definition of Artificial Sequence:  Enzymatic Nucleic Acid
cagucacaggaggaaacucccuucaaggacaucguccgggacccaggg

SEQ ID NO: 2315 - RNA, 48 nt, Artificial Sequence
  Definition of Artificial Sequence:  Enzymatic Nucleic Acid
ggcagucaggaggaaacucccuucaaggacaucguccgggacacccag

SEQ ID NO: 2316 - RNA, 48 nt, Artificial Sequence
  Definition of Artificial Sequence:  Enzymatic Nucleic Acid
gugcccggggaggaaacucccuucaaggacaucguccgggagucacac

SEQ ID NO: 2317 - RNA, 48 nt, Artificial Sequence
  Definition of Artificial Sequence:  Enzymatic Nucleic Acid
ugggcgugggaggaaacucccuucaaggacaucguccgggccggcagu

SEQ ID NO: 2318 - RNA, 48 nt, Artificial Sequence
  Definition of Artificial Sequence:  Enzymatic Nucleic Acid
agagugggggaggaaacucccuucaaggacaucguccggggugcccgg

SEQ ID NO: 2319 - RNA, 48 nt, Artificial Sequence
  Definition of Artificial Sequence:  Enzymatic Nucleic Acid
cagccaggggaggaaacucccuucaaggacaucguccgggccagagug

SEQ ID NO: 2320 - RNA, 48 nt, Artificial Sequence
  Definition of Artificial Sequence:  Enzymatic Nucleic Acid
uucugcagggaggaaacucccuucaaggacaucguccgggcaggccca

SEQ ID NO: 2321 - RNA, 48 nt, Artificial Sequence
  Definition of Artificial Sequence:  Enzymatic Nucleic Acid
aacuucugggaggaaacucccuucaaggacaucguccgggagccaggc

SEQ ID NO: 2322 - RNA, 48 nt, Artificial Sequence
  Definition of Artificial Sequence:  Enzymatic Nucleic Acid
ccgcggaaggaggaaacucccuucaaggacaucguccggguucugcag

SEQ ID NO: 2323 - RNA, 48 nt, Artificial Sequence
  Definition of Artificial Sequence:  Enzymatic Nucleic Acid
aggagccgggaggaaacucccuucaaggacaucguccgggggaacuuc

SEQ ID NO: 2324 - RNA, 48 nt, Artificial Sequence
  Definition of Artificial Sequence:  Enzymatic Nucleic Acid
aggaggagggaggaaacucccuucaaggacaucguccgggcgcggaac

SEQ ID NO: 2325 - RNA, 48 nt, Artificial Sequence
  Definition of Artificial Sequence:  Enzymatic Nucleic Acid
gcagggcaggaggaaacucccuucaaggacaucguccgggcucggagg

SEQ ID NO: 2326 - RNA, 48 nt, Artificial Sequence
  Definition of Artificial Sequence:  Enzymatic Nucleic Acid
cugcagggggaggaaacucccuucaaggacaucguccgggaccucgga

SEQ ID NO: 2327 - RNA, 48 nt, Artificial Sequence
  Definition of Artificial Sequence:  Enzymatic Nucleic Acid
ggaggcugggaggaaacucccuucaaggacaucguccgggagggcacc

SEQ ID NO: 2328 - RNA, 48 nt, Artificial Sequence
  Definition of Artificial Sequence:  Enzymatic Nucleic Acid
gcgggaggggaggaaacucccuucaaggacaucguccgggugcagggc

SEQ ID NO: 2329 - RNA, 48 nt, Artificial Sequence
  Definition of Artificial Sequence:  Enzymatic Nucleic Acid
aggcguugggaggaaacucccuucaaggacaucguccggggggaggcu

SEQ ID NO: 2330 - RNA, 48 nt, Artificial Sequence
  Definition of Artificial Sequence:  Enzymatic Nucleic Acid
cagccaggggaggaaacucccuucaaggacaucguccgggguugcggg

SEQ ID NO: 2331 - RNA, 48 nt, Artificial Sequence
  Definition of Artificial Sequence:  Enzymatic Nucleic Acid
acggccagggaggaaacucccuucaaggacaucguccgggcaggcguu

SEQ ID NO: 2332 - RNA, 48 nt, Artificial Sequence
  Definition of Artificial Sequence:  Enzymatic Nucleic Acid
ggucacggggaggaaacucccuucaaggacaucguccgggcagccagg

SEQ ID NO: 2333 - RNA, 48 nt, Artificial Sequence
  Definition of Artificial Sequence:  Enzymatic Nucleic Acid
ugaggucaggaggaaacucccuucaaggacaucguccgggggccagcc

SEQ ID NO: 2334 - RNA, 48 nt, Artificial Sequence
  Definition of Artificial Sequence:  Enzymatic Nucleic Acid
cagcuaggggaggaaacucccuucaaggacaucguccgggguuugagg

SEQ ID NO: 2335 - RNA, 48 nt, Artificial Sequence
  Definition of Artificial Sequence:  Enzymatic Nucleic Acid
auuggcagggaggaaacucccuucaaggacaucguccggguaggcguu

SEQ ID NO: 2336 - RNA, 48 nt, Artificial Sequence
  Definition of Artificial Sequence:  Enzymatic Nucleic Acid
gucauuggggaggaaacucccuucaaggacaucguccgggagcuaggc

SEQ ID NO: 2337 - RNA, 48 nt, Artificial Sequence
  Definition of Artificial Sequence:  Enzymatic Nucleic Acid
cagcccugggaggaaacucccuucaaggacaucguccgggaggucauu

SEQ ID NO: 2338 - RNA, 48 nt, Artificial Sequence
  Definition of Artificial Sequence:  Enzymatic Nucleic Acid
cagcgcagggaggaaacucccuucaaggacaucguccgggccugcagg

SEQ ID NO: 2339 - RNA, 48 nt, Artificial Sequence
  Definition of Artificial Sequence:  Enzymatic Nucleic Acid
ccacagcgggaggaaacucccuucaaggacaucguccgggagcccugc

SEQ ID NO: 2340 - RNA, 48 nt, Artificial Sequence
  Definition of Artificial Sequence:  Enzymatic Nucleic Acid
ggccacagggaggaaacucccuucaaggacaucguccggggcagcccu

SEQ ID NO: 2341 - RNA, 48 nt, Artificial Sequence
  Definition of Artificial Sequence:  Enzymatic Nucleic Acid
gguggccaggaggaaacucccuucaaggacaucguccgggagcgcagc

SEQ ID NO: 2342 - RNA, 48 nt, Artificial Sequence
  Definition of Artificial Sequence:  Enzymatic Nucleic Acid
gccgguggggaggaaacucccuucaaggacaucguccgggcacagcgc

SEQ ID NO: 2343 - RNA, 48 nt, Artificial Sequence
  Definition of Artificial Sequence:  Enzymatic Nucleic Acid
gguaagggggaggaaacucccuucaaggacaucguccgggcgguggcc

SEQ ID NO: 2344 - RNA, 48 nt, Artificial Sequence
  Definition of Artificial Sequence:  Enzymatic Nucleic Acid
uggcccugggaggaaacucccuucaaggacaucguccgggcgguccag

SEQ ID NO: 2345 - RNA, 48 nt, Artificial Sequence
  Definition of Artificial Sequence:  Enzymatic Nucleic Acid
aucgguggggaggaaacucccuucaaggacaucguccgggccugccgg

SEQ ID NO: 2346 - RNA, 48 nt, Artificial Sequence
  Definition of Artificial Sequence:  Enzymatic Nucleic Acid
cccagcggggaggaaacucccuucaaggacaucguccggguccucauc

SEQ ID NO: 2347 - RNA, 48 nt, Artificial Sequence
  Definition of Artificial Sequence:  Enzymatic Nucleic Acid
agccccagggaggaaacucccuucaaggacaucguccgggggcuccuc

SEQ ID NO: 2348 - RNA, 48 nt, Artificial Sequence
  Definition of Artificial Sequence:  Enzymatic Nucleic Acid
uugggaagggaggaaacucccuucaaggacaucguccgggcccagcgg

SEQ ID NO: 2349 - RNA, 48 nt, Artificial Sequence
  Definition of Artificial Sequence:  Enzymatic Nucleic Acid
uggcagcaggaggaaacucccuucaaggacaucguccggguugggaag

SEQ ID NO: 2350 - RNA, 48 nt, Artificial Sequence
  Definition of Artificial Sequence:  Enzymatic Nucleic Acid
gcuggcagggaggaaacucccuucaaggacaucguccgggacuuggga

SEQ ID NO: 2351 - RNA, 48 nt, Artificial Sequence
  Definition of Artificial Sequence:  Enzymatic Nucleic Acid
cuggcuggggaggaaacucccuucaaggacaucguccgggagcacuug

SEQ ID NO: 2352 - RNA, 48 nt, Artificial Sequence
  Definition of Artificial Sequence:  Enzymatic Nucleic Acid
gcaucuggggaggaaacucccuucaaggacaucguccggguggcagca

SEQ ID NO: 2353 - RNA, 48 nt, Artificial Sequence
  Definition of Artificial Sequence:  Enzymatic Nucleic Acid
gucagcggggaggaaacucccuucaaggacaucguccgggaucuggcu

SEQ ID NO: 2354 - RNA, 48 nt, Artificial Sequence
  Definition of Artificial Sequence:  Enzymatic Nucleic Acid
cuugucagggaggaaacucccuucaaggacaucguccgggggcaucug

SEQ ID NO: 2355 - RNA, 48 nt, Artificial Sequence
  Definition of Artificial Sequence:  Enzymatic Nucleic Acid
uacugaggggaggaaacucccuucaaggacaucguccgggcuugucag

SEQ ID NO: 2356 - RNA, 48 nt, Artificial Sequence
  Definition of Artificial Sequence:  Enzymatic Nucleic Acid
cuccaguaggaggaaacucccuucaaggacaucguccgggugaggccu

SEQ ID NO: 2357 - RNA, 48 nt, Artificial Sequence
  Definition of Artificial Sequence:  Enzymatic Nucleic Acid
cuuccaggggaggaaacucccuucaaggacaucguccggguccaguac

SEQ ID NO: 2358 - RNA, 48 nt, Artificial Sequence
  Definition of Artificial Sequence:  Enzymatic Nucleic Acid
ugccgaagggaggaaacucccuucaaggacaucguccggguggucuuc

SEQ ID NO: 2359 - RNA, 48 nt, Artificial Sequence
  Definition of Artificial Sequence:  Enzymatic Nucleic Acid
auugccugggaggaaacucccuucaaggacaucguccgggcgaagcug

SEQ ID NO: 2360 - RNA, 48 nt, Artificial Sequence
  Definition of Artificial Sequence:  Enzymatic Nucleic Acid
gcgcauugggaggaaacucccuucaaggacaucguccgggcugccgaa

SEQ ID NO: 2361 - RNA, 48 nt, Artificial Sequence
  Definition of Artificial Sequence:  Enzymatic Nucleic Acid
cuucagcgggaggaaacucccuucaaggacaucguccgggauugccug

SEQ ID NO: 2362 - RNA, 48 nt, Artificial Sequence
  Definition of Artificial Sequence:  Enzymatic Nucleic Acid
cccuucagggaggaaacucccuucaaggacaucguccggggcauugcc

SEQ ID NO: 2363 - RNA, 48 nt, Artificial Sequence
  Definition of Artificial Sequence:  Enzymatic Nucleic Acid
gcggcacgggaggaaacucccuucaaggacaucguccggggucccuuc

SEQ ID NO: 2364 - RNA, 48 nt, Artificial Sequence
  Definition of Artificial Sequence:  Enzymatic Nucleic Acid
gggcggcaggaggaaacucccuucaaggacaucguccggggcgucccu

SEQ ID NO: 2365 - RNA, 48 nt, Artificial Sequence
  Definition of Artificial Sequence:  Enzymatic Nucleic Acid
ccgggcggggaggaaacucccuucaaggacaucguccgggacgcgucc

SEQ ID NO: 2366 - RNA, 48 nt, Artificial Sequence
  Definition of Artificial Sequence:  Enzymatic Nucleic Acid
ucaccgggggaggaaacucccuucaaggacaucguccgggggcacgcg

SEQ ID NO: 2367 - RNA, 48 nt, Artificial Sequence
  Definition of Artificial Sequence:  Enzymatic Nucleic Acid
ggcugucaggaggaaacucccuucaaggacaucguccgggcgggcggc

SEQ ID NO: 2368 - RNA, 48 nt, Artificial Sequence
  Definition of Artificial Sequence:  Enzymatic Nucleic Acid
ccggcgggggaggaaacucccuucaaggacaucguccgggugucaccg

SEQ ID NO: 2369 - RNA, 48 nt, Artificial Sequence
  Definition of Artificial Sequence:  Enzymatic Nucleic Acid
uugcccggggaggaaacucccuucaaggacaucguccggggggcuguc

SEQ ID NO: 2370 - RNA, 48 nt, Artificial Sequence
  Definition of Artificial Sequence:  Enzymatic Nucleic Acid
agccguugggaggaaacucccuucaaggacaucguccgggccggcggg

SEQ ID NO: 2371 - RNA, 48 nt, Artificial Sequence
  Definition of Artificial Sequence:  Enzymatic Nucleic Acid
ggccagagggaggaaacucccuucaaggacaucguccgggcguugccc

SEQ ID NO: 2372 - RNA, 48 nt, Artificial Sequence
  Definition of Artificial Sequence:  Enzymatic Nucleic Acid
gccgugggggaggaaacucccuucaaggacaucguccgggcagagccg

SEQ ID NO: 2373 - RNA, 48 nt, Artificial Sequence
  Definition of Artificial Sequence:  Enzymatic Nucleic Acid
uugaugugggaggaaacucccuucaaggacaucguccgggcgugggcc

SEQ ID NO: 2374 - RNA, 48 nt, Artificial Sequence
  Definition of Artificial Sequence:  Enzymatic Nucleic Acid
gagccaggggaggaaacucccuucaaggacaucguccgggagaguccc

SEQ ID NO: 2375 - RNA, 48 nt, Artificial Sequence
  Definition of Artificial Sequence:  Enzymatic Nucleic Acid
cagcagagggaggaaacucccuucaaggacaucguccgggcaggcaga

SEQ ID NO: 2376 - RNA, 48 nt, Artificial Sequence
  Definition of Artificial Sequence:  Enzymatic Nucleic Acid
gggcucagggaggaaacucccuucaaggacaucguccgggagagccag

SEQ ID NO: 2377 - RNA, 48 nt, Artificial Sequence
  Definition of Artificial Sequence:  Enzymatic Nucleic Acid
agcgggggggaggaaacucccuucaaggacaucguccgggucagcaga

SEQ ID NO: 2378 - RNA, 48 nt, Artificial Sequence
  Definition of Artificial Sequence:  Enzymatic Nucleic Acid
gcagugagggaggaaacucccuucaaggacaucguccggggggggcuc

SEQ ID NO: 2379 - RNA, 48 nt, Artificial Sequence
  Definition of Artificial Sequence:  Enzymatic Nucleic Acid
ccgcacugggaggaaacucccuucaaggacaucguccgggagugagcg

SEQ ID NO: 2380 - RNA, 48 nt, Artificial Sequence
  Definition of Artificial Sequence:  Enzymatic Nucleic Acid
gggccgcaggaggaaacucccuucaaggacaucguccgggugcaguga

SEQ ID NO: 2381 - RNA, 48 nt, Artificial Sequence
  Definition of Artificial Sequence:  Enzymatic Nucleic Acid
ucgggccgggaggaaacucccuucaaggacaucguccgggacugcagu

SEQ ID NO: 2382 - RNA, 48 nt, Artificial Sequence
  Definition of Artificial Sequence:  Enzymatic Nucleic Acid
cccucgggggaggaaacucccuucaaggacaucguccgggcgcacugc

SEQ ID NO: 2383 - RNA, 48 nt, Artificial Sequence
  Definition of Artificial Sequence:  Enzymatic Nucleic Acid
gcucggagggaggaaacucccuucaaggacaucguccgggccucgggc

SEQ ID NO: 2384 - RNA, 48 nt, Artificial Sequence
  Definition of Artificial Sequence:  Enzymatic Nucleic Acid
ccugguggggaggaaacucccuucaaggacaucguccgggucggagcc

SEQ ID NO: 2385 - RNA, 48 nt, Artificial Sequence
  Definition of Artificial Sequence:  Enzymatic Nucleic Acid
guggggaaggaggaaacucccuucaaggacaucguccgggccuggugg

SEQ ID NO: 2386 - RNA, 48 nt, Artificial Sequence
  Definition of Artificial Sequence:  Enzymatic Nucleic Acid
ggcgagggggaggaaacucccuucaaggacaucguccgggccgaggug

SEQ ID NO: 2387 - RNA, 48 nt, Artificial Sequence
  Definition of Artificial Sequence:  Enzymatic Nucleic Acid
gccuccggggaggaaacucccuucaaggacaucguccggggagggccc

SEQ ID NO: 2388 - RNA, 48 nt, Artificial Sequence
  Definition of Artificial Sequence:  Enzymatic Nucleic Acid
cagccuggggaggaaacucccuucaaggacaucguccgggcuccggcg

SEQ ID NO: 2389 - RNA, 48 nt, Artificial Sequence
  Definition of Artificial Sequence:  Enzymatic Nucleic Acid
gugaacagggaggaaacucccuucaaggacaucguccgggcuggccuc

SEQ ID NO: 2390 - RNA, 48 nt, Artificial Sequence
  Definition of Artificial Sequence:  Enzymatic Nucleic Acid
ugcgugaaggaggaaacucccuucaaggacaucguccgggagccuggc

SEQ ID NO: 2391 - RNA, 48 nt, Artificial Sequence
  Definition of Artificial Sequence:  Enzymatic Nucleic Acid
gguucuugggaggaaacucccuucaaggacaucguccggggugaacag

SEQ ID NO: 2392 - RNA, 48 nt, Artificial Sequence
  Definition of Artificial Sequence:  Enzymatic Nucleic Acid
ugcgggugggaggaaacucccuucaaggacaucguccggggguucuug

SEQ ID NO: 2393 - RNA, 48 nt, Artificial Sequence
  Definition of Artificial Sequence:  Enzymatic Nucleic Acid
aguggcugggaggaaacucccuucaaggacaucguccggggggugcgg

SEQ ID NO: 2394 - RNA, 48 nt, Artificial Sequence
  Definition of Artificial Sequence:  Enzymatic Nucleic Acid
ggcaguggggaggaaacucccuucaaggacaucguccgggugcgggug

SEQ ID NO: 2395 - RNA, 48 nt, Artificial Sequence
  Definition of Artificial Sequence:  Enzymatic Nucleic Acid
ccagacggggaggaaacucccuucaaggacaucguccgggaguggcug

SEQ ID NO: 2396 - RNA, 48 nt, Artificial Sequence
  Definition of Artificial Sequence:  Enzymatic Nucleic Acid
ggcccagaggaggaaacucccuucaaggacaucguccgggggcagugg

SEQ ID NO: 2397 - RNA, 48 nt, Artificial Sequence
  Definition of Artificial Sequence:  Enzymatic Nucleic Acid
cugccuggggaggaaacucccuucaaggacaucguccgggccagacgg

SEQ ID NO: 2398 - RNA, 48 nt, Artificial Sequence
  Definition of Artificial Sequence:  Enzymatic Nucleic Acid
gcugccugggaggaaacucccuucaaggacaucguccgggcuggccca

SEQ ID NO: 2399 - RNA, 48 nt, Artificial Sequence
  Definition of Artificial Sequence:  Enzymatic Nucleic Acid
ccccgcugggaggaaacucccuucaaggacaucguccgggcugccugg

SEQ ID NO: 2400 - RNA, 48 nt, Artificial Sequence
  Definition of Artificial Sequence:  Enzymatic Nucleic Acid
cacccccgggaggaaacucccuucaaggacaucguccgggugccugcc

SEQ ID NO: 2401 - RNA, 48 nt, Artificial Sequence
  Definition of Artificial Sequence:  Enzymatic Nucleic Acid
ucccgccaggaggaaacucccuucaaggacaucguccgggccccgcug

SEQ ID NO: 2402 - RNA, 48 nt, Artificial Sequence
  Definition of Artificial Sequence:  Enzymatic Nucleic Acid
cagucccgggaggaaacucccuucaaggacaucguccgggcacccccg

SEQ ID NO: 2403 - RNA, 48 nt, Artificial Sequence
  Definition of Artificial Sequence:  Enzymatic Nucleic Acid
cugagucaggaggaaacucccuucaaggacaucguccgggcagucccg

SEQ ID NO: 2404 - RNA, 48 nt, Artificial Sequence
  Definition of Artificial Sequence:  Enzymatic Nucleic Acid
caccugagggaggaaacucccuucaaggacaucguccgggcuucugag

SEQ ID NO: 2405 - RNA, 48 nt, Artificial Sequence
  Definition of Artificial Sequence:  Enzymatic Nucleic Acid
guagggcaggaggaaacucccuucaaggacaucguccgggcugagccu

SEQ ID NO: 2406 - RNA, 48 nt, Artificial Sequence
  Definition of Artificial Sequence:  Enzymatic Nucleic Acid
ggguagggggaggaaacucccuucaaggacaucguccgggaccugagc

SEQ ID NO: 2407 - RNA, 48 nt, Artificial Sequence
  Definition of Artificial Sequence:  Enzymatic Nucleic Acid
aggugaggggaggaaacucccuucaaggacaucguccggguggguagg

SEQ ID NO: 2408 - RNA, 48 nt, Artificial Sequence
  Definition of Artificial Sequence:  Enzymatic Nucleic Acid
ugaggcugggaggaaacucccuucaaggacaucguccgggaggugagg

SEQ ID NO: 2409 - RNA, 48 nt, Artificial Sequence
  Definition of Artificial Sequence:  Enzymatic Nucleic Acid
gggugaggggaggaaacucccuucaaggacaucguccgggugcaggug

SEQ ID NO: 2410 - RNA, 48 nt, Artificial Sequence
  Definition of Artificial Sequence:  Enzymatic Nucleic Acid
gcgccaggggaggaaacucccuucaaggacaucguccgggccaggggg

SEQ ID NO: 2411 - RNA, 48 nt, Artificial Sequence
  Definition of Artificial Sequence:  Enzymatic Nucleic Acid
caccagcgggaggaaacucccuucaaggacaucguccgggcaggccca

SEQ ID NO: 2412 - RNA, 48 nt, Artificial Sequence
  Definition of Artificial Sequence:  Enzymatic Nucleic Acid
agcaccagggaggaaacucccuucaaggacaucguccggggccaggcc

SEQ ID NO: 2413 - RNA, 48 nt, Artificial Sequence
  Definition of Artificial Sequence:  Enzymatic Nucleic Acid
ccacagcaggaggaaacucccuucaaggacaucguccgggcagcgcca

SEQ ID NO: 2414 - RNA, 48 nt, Artificial Sequence
  Definition of Artificial Sequence:  Enzymatic Nucleic Acid
guccacagggaggaaacucccuucaaggacaucguccgggaccagcgc

SEQ ID NO: 2415 - RNA, 48 nt, Artificial Sequence
  Definition of Artificial Sequence:  Enzymatic Nucleic Acid
acuguccaggaggaaacucccuucaaggacaucguccgggagcaccag

SEQ ID NO: 2416 - RNA, 48 nt, Artificial Sequence
  Definition of Artificial Sequence:  Enzymatic Nucleic Acid
cccaagcaggaggaaacucccuucaaggacaucguccggguguccaca

SEQ ID NO: 2417 - RNA, 48 nt, Artificial Sequence
  Definition of Artificial Sequence:  Enzymatic Nucleic Acid
ggcccaagggaggaaacucccuucaaggacaucguccgggacugucca

SEQ ID NO: 2418 - RNA, 48 nt, Artificial Sequence
  Definition of Artificial Sequence:  Enzymatic Nucleic Acid
cagcagggggaggaaacucccuucaaggacaucguccgggccaagcac

SEQ ID NO: 2419 - RNA, 48 nt, Artificial Sequence
  Definition of Artificial Sequence:  Enzymatic Nucleic Acid
ggggucagggaggaaacucccuucaaggacaucguccgggagggccca

SEQ ID NO: 2420 - RNA, 48 nt, Artificial Sequence
  Definition of Artificial Sequence:  Enzymatic Nucleic Acid
cucuucauggaggaaacucccuucaaggacaucguccgggguaggggu

SEQ ID NO: 2421 - RNA, 48 nt, Artificial Sequence
  Definition of Artificial Sequence:  Enzymatic Nucleic Acid
gcccucuuggaggaaacucccuucaaggacaucguccgggaucguagg

SEQ ID NO: 2422 - RNA, 48 nt, Artificial Sequence
  Definition of Artificial Sequence:  Enzymatic Nucleic Acid
gacgcccuggaggaaacucccuucaaggacaucguccggguucaucgu

SEQ ID NO: 2423 - RNA, 48 nt, Artificial Sequence
  Definition of Artificial Sequence:  Enzymatic Nucleic Acid
cggacgccggaggaaacucccuucaaggacaucguccgggucuucauc

SEQ ID NO: 2424 - RNA, 48 nt, Artificial Sequence
  Definition of Artificial Sequence:  Enzymatic Nucleic Acid
gcggacgcggaggaaacucccuucaaggacaucguccgggcucuucau

SEQ ID NO: 2425 - RNA, 48 nt, Artificial Sequence
  Definition of Artificial Sequence:  Enzymatic Nucleic Acid
gcucccucggaggaaacucccuucaaggacaucguccgggagcggacg

SEQ ID NO: 2426 - RNA, 48 nt, Artificial Sequence
  Definition of Artificial Sequence:  Enzymatic Nucleic Acid
ggcucccuggaggaaacucccuucaaggacaucguccgggcagcggac

SEQ ID NO: 2427 - RNA, 48 nt, Artificial Sequence
  Definition of Artificial Sequence:  Enzymatic Nucleic Acid
ccggcuccggaggaaacucccuucaaggacaucguccggguccagcgg

SEQ ID NO: 2428 - RNA, 48 nt, Artificial Sequence
  Definition of Artificial Sequence:  Enzymatic Nucleic Acid
gccggcucggaggaaacucccuucaaggacaucguccgggcuccagcg

SEQ ID NO: 2429 - RNA, 48 nt, Artificial Sequence
  Definition of Artificial Sequence:  Enzymatic Nucleic Acid
agccggcuggaggaaacucccuucaaggacaucguccgggccuccagc

SEQ ID NO: 2430 - RNA, 48 nt, Artificial Sequence
  Definition of Artificial Sequence:  Enzymatic Nucleic Acid
ccagcagcggaggaaacucccuucaaggacaucguccgggggcucccu

SEQ ID NO: 2431 - RNA, 48 nt, Artificial Sequence
  Definition of Artificial Sequence:  Enzymatic Nucleic Acid
acccaugcggaggaaacucccuucaaggacaucguccgggagcagccg

SEQ ID NO: 2432 - RNA, 48 nt, Artificial Sequence
  Definition of Artificial Sequence:  Enzymatic Nucleic Acid
acagcaccggaggaaacucccuucaaggacaucguccgggaugccagc

SEQ ID NO: 2433 - RNA, 48 nt, Artificial Sequence
  Definition of Artificial Sequence:  Enzymatic Nucleic Acid
cacagcacggaggaaacucccuucaaggacaucguccgggcaugccag

SEQ ID NO: 2434 - RNA, 48 nt, Artificial Sequence
  Definition of Artificial Sequence:  Enzymatic Nucleic Acid
ccugcagcggaggaaacucccuucaaggacaucguccgggacagcacc

SEQ ID NO: 2435 - RNA, 48 nt, Artificial Sequence
  Definition of Artificial Sequence:  Enzymatic Nucleic Acid
ugccaggcggaggaaacucccuucaaggacaucguccgggugcagcca

SEQ ID NO: 2436 - RNA, 48 nt, Artificial Sequence
  Definition of Artificial Sequence:  Enzymatic Nucleic Acid
ccaccugcggaggaaacucccuucaaggacaucguccgggaggccugc

SEQ ID NO: 2437 - RNA, 48 nt, Artificial Sequence
  Definition of Artificial Sequence:  Enzymatic Nucleic Acid
gcugccacggaggaaacucccuucaaggacaucguccgggugccaggc

SEQ ID NO: 2438 - RNA, 48 nt, Artificial Sequence
  Definition of Artificial Sequence:  Enzymatic Nucleic Acid
ggggcugcggaggaaacucccuucaaggacaucguccgggaccugcca

SEQ ID NO: 2439 - RNA, 48 nt, Artificial Sequence
  Definition of Artificial Sequence:  Enzymatic Nucleic Acid
gcaggcacggaggaaacucccuucaaggacaucguccgggugggcaug

SEQ ID NO: 2440 - RNA, 48 nt, Artificial Sequence
  Definition of Artificial Sequence:  Enzymatic Nucleic Acid
cuugggcuggaggaaacucccuucaaggacaucguccgggauuguagc

SEQ ID NO: 2441 - RNA, 48 nt, Artificial Sequence
  Definition of Artificial Sequence:  Enzymatic Nucleic Acid
gucgucacggaggaaacucccuucaaggacaucguccggguugggcuc

SEQ ID NO: 2442 - RNA, 48 nt, Artificial Sequence
  Definition of Artificial Sequence:  Enzymatic Nucleic Acid
cuugucguggaggaaacucccuucaaggacaucguccgggaccuuggg

SEQ ID NO: 2443 - RNA, 48 nt, Artificial Sequence
  Definition of Artificial Sequence:  Enzymatic Nucleic Acid
cagcuuguggaggaaacucccuucaaggacaucguccggggucaccuu

SEQ ID NO: 2444 - RNA, 48 nt, Artificial Sequence
  Definition of Artificial Sequence:  Enzymatic Nucleic Acid
ugcaggccggaggaaacucccuucaaggacaucguccgggugcugggg

SEQ ID NO: 2445 - RNA, 48 nt, Artificial Sequence
  Definition of Artificial Sequence:  Enzymatic Nucleic Acid
cugcaggcggaggaaacucccuucaaggacaucguccgggcugcuggg

SEQ ID NO: 2446 - RNA, 48 nt, Artificial Sequence
  Definition of Artificial Sequence:  Enzymatic Nucleic Acid
ggcacagcggaggaaacucccuucaaggacaucguccgggugcaggcc

SEQ ID NO: 2447 - RNA, 48 nt, Artificial Sequence
  Definition of Artificial Sequence:  Enzymatic Nucleic Acid
gggaugccggaggaaacucccuucaaggacaucguccgggacgggcac

SEQ ID NO: 2448 - RNA, 48 nt, Artificial Sequence
  Definition of Artificial Sequence:  Enzymatic Nucleic Acid
agggaugcggaggaaacucccuucaaggacaucguccgggcacgggca

SEQ ID NO: 2449 - RNA, 48 nt, Artificial Sequence
  Definition of Artificial Sequence:  Enzymatic Nucleic Acid
gcgguugcggaggaaacucccuucaaggacaucguccggggugcagga

SEQ ID NO: 2450 - RNA, 48 nt, Artificial Sequence; identical to SEQ ID NO: 2449
  Definition of Artificial Sequence:  Enzymatic Nucleic Acid

SEQ ID NO: 2451 - RNA, 48 nt, Artificial Sequence
  Definition of Artificial Sequence:  Enzymatic Nucleic Acid
agugcagcggaggaaacucccuucaaggacaucguccgggacaggaug

SEQ ID NO: 2452 - RNA, 48 nt, Artificial Sequence
  Definition of Artificial Sequence:  Enzymatic Nucleic Acid
agcacauuggaggaaacucccuucaaggacaucguccggggagugcag

SEQ ID NO: 2453 - RNA, 48 nt, Artificial Sequence
  Definition of Artificial Sequence:  Enzymatic Nucleic Acid
auucgggcggaggaaacucccuucaaggacaucguccgggagcacauu

SEQ ID NO: 2454 - RNA, 48 nt, Artificial Sequence
  Definition of Artificial Sequence:  Enzymatic Nucleic Acid
caucaauuggaggaaacucccuucaaggacaucguccggggggccagc

SEQ ID NO: 2455 - RNA, 48 nt, Artificial Sequence
  Definition of Artificial Sequence:  Enzymatic Nucleic Acid
agccgcauggaggaaacucccuucaaggacaucguccgggaauucggg

SEQ ID NO: 2456 - RNA, 48 nt, Artificial Sequence
  Definition of Artificial Sequence:  Enzymatic Nucleic Acid
aaggcagcggaggaaacucccuucaaggacaucguccggggcaucaau

SEQ ID NO: 2457 - RNA, 48 nt, Artificial Sequence
  Definition of Artificial Sequence:  Enzymatic Nucleic Acid
ggccaggcggaggaaacucccuucaaggacaucguccgggagugaagg

SEQ ID NO: 2458 - RNA, 48 nt, Artificial Sequence
  Definition of Artificial Sequence:  Enzymatic Nucleic Acid
aggagggcggaggaaacucccuucaaggacaucguccgggaggccagu

SEQ ID NO: 2459 - RNA, 48 nt, Artificial Sequence
  Definition of Artificial Sequence:  Enzymatic Nucleic Acid
agcugcucggaggaaacucccuucaaggacaucguccgggaggagggc

SEQ ID NO: 2460 - RNA, 48 nt, Artificial Sequence
  Definition of Artificial Sequence:  Enzymatic Nucleic Acid
cagcugcuggaggaaacucccuucaaggacaucguccgggcaggaggg

SEQ ID NO: 2461 - RNA, 48 nt, Artificial Sequence
  Definition of Artificial Sequence:  Enzymatic Nucleic Acid
cugaggucggaggaaacucccuucaaggacaucguccgggagcugcuc

SEQ ID NO: 2462 - RNA, 48 nt, Artificial Sequence
  Definition of Artificial Sequence:  Enzymatic Nucleic Acid
gcugagguggaggaaacucccuucaaggacaucguccgggcagcugcu

SEQ ID NO: 2463 - RNA, 48 nt, Artificial Sequence
  Definition of Artificial Sequence:  Enzymatic Nucleic Acid
ugcauuauggaggaaacucccuucaaggacaucguccggggcugaggu

SEQ ID NO: 2464 - RNA, 48 nt, Artificial Sequence
  Definition of Artificial Sequence:  Enzymatic Nucleic Acid
ccacagacggaggaaacucccuucaaggacaucguccgggggagcugu

SEQ ID NO: 2465 - RNA, 48 nt, Artificial Sequence
  Definition of Artificial Sequence:  Enzymatic Nucleic Acid
gcagggucggaggaaacucccuucaaggacaucguccgggacagaccg

SEQ ID NO: 2466 - RNA, 48 nt, Artificial Sequence
  Definition of Artificial Sequence:  Enzymatic Nucleic Acid
ggcaggguggaggaaacucccuucaaggacaucguccgggcacagacc

SEQ ID NO: 2467 - RNA, 48 nt, Artificial Sequence
  Definition of Artificial Sequence:  Enzymatic Nucleic Acid
gcccaggcggaggaaacucccuucaaggacaucguccgggguggaaug

SEQ ID NO: 2468 - RNA, 48 nt, Artificial Sequence
  Definition of Artificial Sequence:  Enzymatic Nucleic Acid
aggcggccggaggaaacucccuucaaggacaucguccgggaggccgug

SEQ ID NO: 2469 - RNA, 48 nt, Artificial Sequence
  Definition of Artificial Sequence:  Enzymatic Nucleic Acid
uaggcggcggaggaaacucccuucaaggacaucguccgggcaggccgu

SEQ ID NO: 2470 - RNA, 48 nt, Artificial Sequence
  Definition of Artificial Sequence:  Enzymatic Nucleic Acid
cagcggucggaggaaacucccuucaaggacaucguccgggaggugcag

SEQ ID NO: 2471 - RNA, 48 nt, Artificial Sequence
  Definition of Artificial Sequence:  Enzymatic Nucleic Acid
gcagcgguggaggaaacucccuucaaggacaucguccgggcaggugca

SEQ ID NO: 2472 - RNA, 48 nt, Artificial Sequence
  Definition of Artificial Sequence:  Enzymatic Nucleic Acid
cugcaggcggaggaaacucccuucaaggacaucguccggggcagcggu

SEQ ID NO: 2473 - RNA, 48 nt, Artificial Sequence
  Definition of Artificial Sequence:  Enzymatic Nucleic Acid
cccagcucggaggaaacucccuucaaggacaucguccgggugcaggcc

SEQ ID NO: 2474 - RNA, 48 nt, Artificial Sequence
  Definition of Artificial Sequence:  Enzymatic Nucleic Acid
gcccagcuggaggaaacucccuucaaggacaucguccgggcugcaggc

SEQ ID NO: 2475 - RNA, 48 nt, Artificial Sequence
  Definition of Artificial Sequence:  Enzymatic Nucleic Acid
cccgggccggaggaaacucccuucaaggacaucguccgggagcuccug

SEQ ID NO: 2476 - RNA, 48 nt, Artificial Sequence
  Definition of Artificial Sequence:  Enzymatic Nucleic Acid
ccccgggcggaggaaacucccuucaaggacaucguccgggcagcuccu

SEQ ID NO: 2477 - RNA, 48 nt, Artificial Sequence
  Definition of Artificial Sequence:  Enzymatic Nucleic Acid
aacagcccggaggaaacucccuucaaggacaucguccggggggcccag

SEQ ID NO: 2478 - RNA, 48 nt, Artificial Sequence
  Definition of Artificial Sequence:  Enzymatic Nucleic Acid
gaacagccggaggaaacucccuucaaggacaucguccgggcgggccca

SEQ ID NO: 2479 - RNA, 48 nt, Artificial Sequence
  Definition of Artificial Sequence:  Enzymatic Nucleic Acid
ggaacagcggaggaaacucccuucaaggacaucguccgggccgggccc

SEQ ID NO: 2480 - RNA, 48 nt, Artificial Sequence
  Definition of Artificial Sequence:  Enzymatic Nucleic Acid
agccaggcggaggaaacucccuucaaggacaucguccggggcggaaca

SEQ ID NO: 2481 - RNA, 48 nt, Artificial Sequence
  Definition of Artificial Sequence:  Enzymatic Nucleic Acid
agggcagcggaggaaacucccuucaaggacaucguccgggaggccgcg

SEQ ID NO: 2482 - RNA, 48 nt, Artificial Sequence
  Definition of Artificial Sequence:  Enzymatic Nucleic Acid
gcguugucggaggaaacucccuucaaggacaucguccgggugcaggua

SEQ ID NO: 2483 - RNA, 48 nt, Artificial Sequence
  Definition of Artificial Sequence:  Enzymatic Nucleic Acid
cgcguuguggaggaaacucccuucaaggacaucguccgggcugcaggu

SEQ ID NO: 2484 - RNA, 48 nt, Artificial Sequence
  Definition of Artificial Sequence:  Enzymatic Nucleic Acid
ggcagugcggaggaaacucccuucaaggacaucguccgggugcagcgc

SEQ ID NO: 2485 - RNA, 48 nt, Artificial Sequence
  Definition of Artificial Sequence:  Enzymatic Nucleic Acid
ggugucauggaggaaacucccuucaaggacaucguccgggaggcagug

SEQ ID NO: 2486 - RNA, 48 nt, Artificial Sequence
  Definition of Artificial Sequence:  Enzymatic Nucleic Acid
gaagguguggaggaaacucccuucaaggacaucguccgggaucaggca

SEQ ID NO: 2487 - RNA, 48 nt, Artificial Sequence
  Definition of Artificial Sequence:  Enzymatic Nucleic Acid
gcccagguggaggaaacucccuucaaggacaucguccggggcggaagg

SEQ ID NO: 2488 - RNA, 48 nt, Artificial Sequence
  Definition of Artificial Sequence:  Enzymatic Nucleic Acid
agguugccggaggaaacucccuucaaggacaucguccgggaggucgcg

SEQ ID NO: 2489 - RNA, 48 nt, Artificial Sequence
  Definition of Artificial Sequence:  Enzymatic Nucleic Acid
gagguugcggaggaaacucccuucaaggacaucguccgggcaggucgc

SEQ ID NO: 2490 - RNA, 48 nt, Artificial Sequence
  Definition of Artificial Sequence:  Enzymatic Nucleic Acid
ggcgcgcuggaggaaacucccuucaaggacaucguccggggggcacgc

SEQ ID NO: 2491 - RNA, 48 nt, Artificial Sequence
  Definition of Artificial Sequence:  Enzymatic Nucleic Acid
gugcagccggaggaaacucccuucaaggacaucguccgggacggaagg

SEQ ID NO: 2492 - RNA, 48 nt, Artificial Sequence
  Definition of Artificial Sequence:  Enzymatic Nucleic Acid
ugugcagcggaggaaacucccuucaaggacaucguccgggcacggaag

SEQ ID NO: 2493 - RNA, 48 nt, Artificial Sequence
  Definition of Artificial Sequence:  Enzymatic Nucleic Acid
gagacgguggaggaaacucccuucaaggacaucguccggggaggcugu

SEQ ID NO: 2494 - RNA, 48 nt, Artificial Sequence
  Definition of Artificial Sequence:  Enzymatic Nucleic Acid
acgcgguuggaggaaacucccuucaaggacaucguccggguggugcag

SEQ ID NO: 2495 - RNA, 48 nt, Artificial Sequence
  Definition of Artificial Sequence:  Enzymatic Nucleic Acid
acaugggcggaggaaacucccuucaaggacaucguccgggacgcgguu

SEQ ID NO: 2496 - RNA, 48 nt, Artificial Sequence
  Definition of Artificial Sequence:  Enzymatic Nucleic Acid
gccaagguggaggaaacucccuucaaggacaucguccgggacggaagg

SEQ ID NO: 2497 - RNA, 48 nt, Artificial Sequence
  Definition of Artificial Sequence:  Enzymatic Nucleic Acid
gaggcggcggaggaaacucccuucaaggacaucguccgggaaggucac

SEQ ID NO: 2498 - RNA, 48 nt, Artificial Sequence
  Definition of Artificial Sequence:  Enzymatic Nucleic Acid
uagaguguggaggaaacucccuucaaggacaucguccgggaugaggcg

SEQ ID NO: 2499 - RNA, 48 nt, Artificial Sequence
  Definition of Artificial Sequence:  Enzymatic Nucleic Acid
cagggccuggaggaaacucccuucaaggacaucguccgggagugggca

SEQ ID NO: 2500 - RNA, 48 nt, Artificial Sequence
  Definition of Artificial Sequence:  Enzymatic Nucleic Acid
gccagggcggaggaaacucccuucaaggacaucguccgggucaguggg

SEQ ID NO: 2501 - RNA, 48 nt, Artificial Sequence
  Definition of Artificial Sequence:  Enzymatic Nucleic Acid
aggggggcggaggaaacucccuucaaggacaucguccgggagggccuc

SEQ ID NO: 2502 - RNA, 48 nt, Artificial Sequence
  Definition of Artificial Sequence:  Enzymatic Nucleic Acid
uugagccuggaggaaacucccuucaaggacaucguccgggagguacug

SEQ ID NO: 2503 - RNA, 48 nt, Artificial Sequence
  Definition of Artificial Sequence:  Enzymatic Nucleic Acid
cguugagcggaggaaacucccuucaaggacaucguccgggucagguac

SEQ ID NO: 2504 - RNA, 48 nt, Artificial Sequence
  Definition of Artificial Sequence:  Enzymatic Nucleic Acid
gggguuguggaggaaacucccuucaaggacaucguccgggguugagcc

SEQ ID NO: 2505 - RNA, 48 nt, Artificial Sequence
  Definition of Artificial Sequence:  Enzymatic Nucleic Acid
cacacaccggaggaaacucccuucaaggacaucguccgggagggguug

SEQ ID NO: 2506 - RNA, 48 nt, Artificial Sequence
  Definition of Artificial Sequence:  Enzymatic Nucleic Acid
ucacacacggaggaaacucccuucaaggacaucguccgggcagggguu

SEQ ID NO: 2507 - RNA, 48 nt, Artificial Sequence
  Definition of Artificial Sequence:  Enzymatic Nucleic Acid
ccggcaguggaggaaacucccuucaaggacaucguccgggacacaccc

SEQ ID NO: 2508 - RNA, 48 nt, Artificial Sequence
  Definition of Artificial Sequence:  Enzymatic Nucleic Acid
ggcgugccggaggaaacucccuucaaggacaucguccgggggcaguca

SEQ ID NO: 2509 - RNA, 48 nt, Artificial Sequence
  Definition of Artificial Sequence:  Enzymatic Nucleic Acid
gggcgugcggaggaaacucccuucaaggacaucguccgggcggcaguc

SEQ ID NO: 2510 - RNA, 48 nt, Artificial Sequence
  Definition of Artificial Sequence:  Enzymatic Nucleic Acid
gccaggccggaggaaacucccuucaaggacaucguccgggagaguggg

SEQ ID NO: 2511 - RNA, 48 nt, Artificial Sequence
  Definition of Artificial Sequence:  Enzymatic Nucleic Acid
agccaggcggaggaaacucccuucaaggacaucguccgggcagagugg

SEQ ID NO: 2512 - RNA, 48 nt, Artificial Sequence
  Definition of Artificial Sequence:  Enzymatic Nucleic Acid
ucugcagcggaggaaacucccuucaaggacaucguccgggaggcccag

SEQ ID NO: 2513 - RNA, 48 nt, Artificial Sequence
  Definition of Artificial Sequence:  Enzymatic Nucleic Acid
cggaacuuggaggaaacucccuucaaggacaucguccgggugcagcca

SEQ ID NO: 2514 - RNA, 48 nt, Artificial Sequence
  Definition of Artificial Sequence:  Enzymatic Nucleic Acid
ggaggagcggaggaaacucccuucaaggacaucguccggggcggaacu

SEQ ID NO: 2515 - RNA, 48 nt, Artificial Sequence
  Definition of Artificial Sequence:  Enzymatic Nucleic Acid
gggcaccuggaggaaacucccuucaaggacaucguccgggggaggagg

SEQ ID NO: 2516 - RNA, 48 nt, Artificial Sequence
  Definition of Artificial Sequence:  Enzymatic Nucleic Acid
cagggcacggaggaaacucccuucaaggacaucguccgggucggagga

SEQ ID NO: 2517 - RNA, 48 nt, Artificial Sequence
  Definition of Artificial Sequence:  Enzymatic Nucleic Acid
cggccagcggaggaaacucccuucaaggacaucguccgggaggcguug

SEQ ID NO: 2518 - RNA, 48 nt, Artificial Sequence
  Definition of Artificial Sequence:  Enzymatic Nucleic Acid
gucacggcggaggaaacucccuucaaggacaucguccgggagccaggc

SEQ ID NO: 2519 - RNA, 48 nt, Artificial Sequence
  Definition of Artificial Sequence:  Enzymatic Nucleic Acid
uuugagguggaggaaacucccuucaaggacaucguccgggacggccag

SEQ ID NO: 2520 - RNA, 48 nt, Artificial Sequence
  Definition of Artificial Sequence:  Enzymatic Nucleic Acid
cugcagguggaggaaacucccuucaaggacaucguccgggauuggcag

SEQ ID NO: 2521 - RNA, 48 nt, Artificial Sequence
  Definition of Artificial Sequence:  Enzymatic Nucleic Acid
gcgcagccggaggaaacucccuucaaggacaucguccgggugcagguc

SEQ ID NO: 2522 - RNA, 48 nt, Artificial Sequence
  Definition of Artificial Sequence:  Enzymatic Nucleic Acid
agcgcagcggaggaaacucccuucaaggacaucguccgggcugcaggu

SEQ ID NO: 2523 - RNA, 48 nt, Artificial Sequence
  Definition of Artificial Sequence:  Enzymatic Nucleic Acid
ccgguggcggaggaaacucccuucaaggacaucguccgggacagcgca

SEQ ID NO: 2524 - RNA, 48 nt, Artificial Sequence
  Definition of Artificial Sequence:  Enzymatic Nucleic Acid
guaagggcggaggaaacucccuucaaggacaucguccggggguggcca

SEQ ID NO: 2525 - RNA, 48 nt, Artificial Sequence
  Definition of Artificial Sequence:  Enzymatic Nucleic Acid
ugccggucggaggaaacucccuucaaggacaucguccgggagauggga

SEQ ID NO: 2526 - RNA, 48 nt, Artificial Sequence
  Definition of Artificial Sequence:  Enzymatic Nucleic Acid
cugccgguggaggaaacucccuucaaggacaucguccgggcagauggg

SEQ ID NO: 2527 - RNA, 48 nt, Artificial Sequence
  Definition of Artificial Sequence:  Enzymatic Nucleic Acid
ggcccugcggaggaaacucccuucaaggacaucguccggggguccaga

SEQ ID NO: 2528 - RNA, 48 nt, Artificial Sequence
  Definition of Artificial Sequence:  Enzymatic Nucleic Acid
cgguggccggaggaaacucccuucaaggacaucguccgggugccgguc

SEQ ID NO: 2529 - RNA, 48 nt, Artificial Sequence
  Definition of Artificial Sequence:  Enzymatic Nucleic Acid
ucgguggcggaggaaacucccuucaaggacaucguccgggcugccggu

SEQ ID NO: 2530 - RNA, 48 nt, Artificial Sequence
  Definition of Artificial Sequence:  Enzymatic Nucleic Acid
cuccucauggaggaaacucccuucaaggacaucguccggggguggccc

SEQ ID NO: 2531 - RNA, 48 nt, Artificial Sequence
  Definition of Artificial Sequence:  Enzymatic Nucleic Acid
cggcuccuggaggaaacucccuucaaggacaucguccgggaucggugg

SEQ ID NO: 2532 - RNA, 48 nt, Artificial Sequence
  Definition of Artificial Sequence:  Enzymatic Nucleic Acid
agcggcucggaggaaacucccuucaaggacaucguccgggucaucggu

SEQ ID NO: 2533 - RNA, 48 nt, Artificial Sequence
  Definition of Artificial Sequence:  Enzymatic Nucleic Acid
cagcggcuggaggaaacucccuucaaggacaucguccgggcucaucgg

SEQ ID NO: 2534 - RNA, 48 nt, Artificial Sequence
  Definition of Artificial Sequence:  Enzymatic Nucleic Acid
ggaagcccggaggaaacucccuucaaggacaucguccgggagcggcuc

SEQ ID NO: 2535 - RNA, 48 nt, Artificial Sequence
  Definition of Artificial Sequence:  Enzymatic Nucleic Acid
gggaagccggaggaaacucccuucaaggacaucguccgggcagcggcu

SEQ ID NO: 2536 - RNA, 48 nt, Artificial Sequence
  Definition of Artificial Sequence:  Enzymatic Nucleic Acid
ugggaagcggaggaaacucccuucaaggacaucguccgggccagcggc

SEQ ID NO: 2537 - RNA, 48 nt, Artificial Sequence
  Definition of Artificial Sequence:  Enzymatic Nucleic Acid
agcggcauggaggaaacucccuucaaggacaucguccggguggcuggc

SEQ ID NO: 2538 - RNA, 48 nt, Artificial Sequence
  Definition of Artificial Sequence:  Enzymatic Nucleic Acid
ggccuuguggaggaaacucccuucaaggacaucguccgggagcggcau

SEQ ID NO: 2539 - RNA, 48 nt, Artificial Sequence
  Definition of Artificial Sequence:  Enzymatic Nucleic Acid
acugaggcggaggaaacucccuucaaggacaucguccggguugucagc

SEQ ID NO: 2540 - RNA, 48 nt, Artificial Sequence
  Definition of Artificial Sequence:  Enzymatic Nucleic Acid
ccaggcucggaggaaacucccuucaaggacaucguccgggaguacuga

SEQ ID NO: 2541 - RNA, 48 nt, Artificial Sequence
  Definition of Artificial Sequence:  Enzymatic Nucleic Acid
uccaggcuggaggaaacucccuucaaggacaucguccgggcaguacug

SEQ ID NO: 2542 - RNA, 48 nt, Artificial Sequence
  Definition of Artificial Sequence:  Enzymatic Nucleic Acid
uggucuucggaggaaacucccuucaaggacaucguccgggaggcucca

SEQ ID NO: 2543 - RNA, 48 nt, Artificial Sequence
  Definition of Artificial Sequence:  Enzymatic Nucleic Acid
cuggucuuggaggaaacucccuucaaggacaucguccgggcaggcucc

SEQ ID NO: 2544 - RNA, 48 nt, Artificial Sequence
  Definition of Artificial Sequence:  Enzymatic Nucleic Acid
aagcugguggaggaaacucccuucaaggacaucguccggguuccaggc

SEQ ID NO: 2545 - RNA, 48 nt, Artificial Sequence
  Definition of Artificial Sequence:  Enzymatic Nucleic Acid
uugccugcggaggaaacucccuucaaggacaucguccggggaagcugg

SEQ ID NO: 2546 - RNA, 48 nt, Artificial Sequence
  Definition of Artificial Sequence:  Enzymatic Nucleic Acid
cgcauugcggaggaaacucccuucaaggacaucguccgggugccgaag

SEQ ID NO: 2547 - RNA, 48 nt, Artificial Sequence
  Definition of Artificial Sequence:  Enzymatic Nucleic Acid
cgucccuuggaggaaacucccuucaaggacaucguccgggagcgcauu

SEQ ID NO: 2548 - RNA, 48 nt, Artificial Sequence
  Definition of Artificial Sequence:  Enzymatic Nucleic Acid
acgcguccggaggaaacucccuucaaggacaucguccggguucagcgc

SEQ ID NO: 2549 - RNA, 48 nt, Artificial Sequence
  Definition of Artificial Sequence:  Enzymatic Nucleic Acid
cacgcgucggaggaaacucccuucaaggacaucguccgggcuucagcg

SEQ ID NO: 2550 - RNA, 48 nt, Artificial Sequence
  Definition of Artificial Sequence:  Enzymatic Nucleic Acid
gcacgcguggaggaaacucccuucaaggacaucguccgggccuucagc

SEQ ID NO: 2551 - RNA, 48 nt, Artificial Sequence
  Definition of Artificial Sequence:  Enzymatic Nucleic Acid
gcugucacggaggaaacucccuucaaggacaucguccggggggcggca

SEQ ID NO: 2552 - RNA, 48 nt, Artificial Sequence
  Definition of Artificial Sequence:  Enzymatic Nucleic Acid
cgggcuguggaggaaacucccuucaaggacaucguccgggaccgggcg

SEQ ID NO: 2553 - RNA, 48 nt, Artificial Sequence
  Definition of Artificial Sequence:  Enzymatic Nucleic Acid
ccguugccggaggaaacucccuucaaggacaucguccgggggcgggcu

SEQ ID NO: 2554 - RNA, 48 nt, Artificial Sequence
  Definition of Artificial Sequence:  Enzymatic Nucleic Acid
gccguugcggaggaaacucccuucaaggacaucguccgggcggcgggc

SEQ ID NO: 2555 - RNA, 48 nt, Artificial Sequence
  Definition of Artificial Sequence:  Enzymatic Nucleic Acid
gccagagcggaggaaacucccuucaaggacaucguccgggguugcccg

SEQ ID NO: 2556 - RNA, 48 nt, Artificial Sequence
  Definition of Artificial Sequence:  Enzymatic Nucleic Acid
ccgugggcggaggaaacucccuucaaggacaucguccgggagagccgu

SEQ ID NO: 2557 - RNA, 48 nt, Artificial Sequence
  Definition of Artificial Sequence:  Enzymatic Nucleic Acid
ugaugugcggaggaaacucccuucaaggacaucguccggggugggcca

SEQ ID NO: 2558 - RNA, 48 nt, Artificial Sequence
  Definition of Artificial Sequence:  Enzymatic Nucleic Acid
gggugaguggaggaaacucccuucaaggacaucguccgggauugaugu

SEQ ID NO: 2559 - RNA, 48 nt, Artificial Sequence
  Definition of Artificial Sequence:  Enzymatic Nucleic Acid
cagaguccggaggaaacucccuucaaggacaucguccgggaaagggug

SEQ ID NO: 2560 - RNA, 48 nt, Artificial Sequence
  Definition of Artificial Sequence:  Enzymatic Nucleic Acid
gcagagucggaggaaacucccuucaaggacaucguccgggcaaagggu

SEQ ID NO: 2561 - RNA, 48 nt, Artificial Sequence
  Definition of Artificial Sequence:  Enzymatic Nucleic Acid
ggcagaguggaggaaacucccuucaaggacaucguccgggccaaaggg

SEQ ID NO: 2562 - RNA, 48 nt, Artificial Sequence
  Definition of Artificial Sequence:  Enzymatic Nucleic Acid
agcagagcggaggaaacucccuucaaggacaucguccgggaggcagag

SEQ ID NO: 2563 - RNA, 48 nt, Artificial Sequence
  Definition of Artificial Sequence:  Enzymatic Nucleic Acid
cgggggcuggaggaaacucccuucaaggacaucguccgggagcagagc

SEQ ID NO: 2564 - RNA, 48 nt, Artificial Sequence
  Definition of Artificial Sequence:  Enzymatic Nucleic Acid
ccucgggcggaggaaacucccuucaaggacaucguccggggcacugca

SEQ ID NO: 2565 - RNA, 48 nt, Artificial Sequence
  Definition of Artificial Sequence:  Enzymatic Nucleic Acid
ggagcccuggaggaaacucccuucaaggacaucguccggggggccgca

SEQ ID NO: 2566 - RNA, 48 nt, Artificial Sequence
  Definition of Artificial Sequence:  Enzymatic Nucleic Acid
ucggagccggaggaaacucccuucaaggacaucguccgggucgggccg

SEQ ID NO: 2567 - RNA, 48 nt, Artificial Sequence
  Definition of Artificial Sequence:  Enzymatic Nucleic Acid
cucggagcggaggaaacucccuucaaggacaucguccgggcucgggcc

SEQ ID NO: 2568 - RNA, 48 nt, Artificial Sequence
  Definition of Artificial Sequence:  Enzymatic Nucleic Acid
ugguggcuggaggaaacucccuucaaggacaucguccgggggagcccu

SEQ ID NO: 2569 - RNA, 48 nt, Artificial Sequence
  Definition of Artificial Sequence:  Enzymatic Nucleic Acid
ggggaaccggaggaaacucccuucaaggacaucguccgggugguggcu

SEQ ID NO: 2570 - RNA, 48 nt, Artificial Sequence
  Definition of Artificial Sequence:  Enzymatic Nucleic Acid
uggggaacggaggaaacucccuucaaggacaucguccgggcugguggc

SEQ ID NO: 2571 - RNA, 48 nt, Artificial Sequence
  Definition of Artificial Sequence:  Enzymatic Nucleic Acid
cgagggccggaggaaacucccuucaaggacaucguccggggagguggg

SEQ ID NO: 2572 - RNA, 48 nt, Artificial Sequence
  Definition of Artificial Sequence:  Enzymatic Nucleic Acid
gcgagggcggaggaaacucccuucaaggacaucguccgggcgaggugg

SEQ ID NO: 2573 - RNA, 48 nt, Artificial Sequence
  Definition of Artificial Sequence:  Enzymatic Nucleic Acid
cuggccucggaggaaacucccuucaaggacaucguccgggggcgaggg

SEQ ID NO: 2574 - RNA, 48 nt, Artificial Sequence
  Definition of Artificial Sequence:  Enzymatic Nucleic Acid
ccuggccuggaggaaacucccuucaaggacaucguccgggcggcgagg

SEQ ID NO: 2575 - RNA, 48 nt, Artificial Sequence
  Definition of Artificial Sequence:  Enzymatic Nucleic Acid
agccuggcggaggaaacucccuucaaggacaucguccggguccggcga

SEQ ID NO: 2576 - RNA, 48 nt, Artificial Sequence
  Definition of Artificial Sequence:  Enzymatic Nucleic Acid
ugaacagcggaggaaacucccuucaaggacaucguccggguggccucc

SEQ ID NO: 2577 - RNA, 48 nt, Artificial Sequence
  Definition of Artificial Sequence:  Enzymatic Nucleic Acid
gugcgguuggaggaaacucccuucaaggacaucguccggguugcguga

SEQ ID NO: 2578 - RNA, 48 nt, Artificial Sequence
  Definition of Artificial Sequence:  Enzymatic Nucleic Acid
gccuggccggaggaaacucccuucaaggacaucguccgggagacggca

SEQ ID NO: 2579 - RNA, 48 nt, Artificial Sequence
  Definition of Artificial Sequence:  Enzymatic Nucleic Acid
ugccuggcggaggaaacucccuucaaggacaucguccgggcagacggc

SEQ ID NO: 2580 - RNA, 48 nt, Artificial Sequence
  Definition of Artificial Sequence:  Enzymatic Nucleic Acid
cugccugcggaggaaacucccuucaaggacaucguccggguggcccag

SEQ ID NO: 2581 - RNA, 48 nt, Artificial Sequence
  Definition of Artificial Sequence:  Enzymatic Nucleic Acid
cccgcugcggaggaaacucccuucaaggacaucguccgggugccuggc

SEQ ID NO: 2582 - RNA, 48 nt, Artificial Sequence
  Definition of Artificial Sequence:  Enzymatic Nucleic Acid
gccaccccggaggaaacucccuucaaggacaucguccggggcugccug

SEQ ID NO: 2583 - RNA, 48 nt, Artificial Sequence
  Definition of Artificial Sequence:  Enzymatic Nucleic Acid
cgccacccggaggaaacucccuucaaggacaucguccgggcgcugccu

SEQ ID NO: 2584 - RNA, 48 nt, Artificial Sequence
  Definition of Artificial Sequence:  Enzymatic Nucleic Acid
ccgccaccggaggaaacucccuucaaggacaucguccgggccgcugcc

SEQ ID NO: 2585 - RNA, 48 nt, Artificial Sequence
  Definition of Artificial Sequence:  Enzymatic Nucleic Acid
cccgccacggaggaaacucccuucaaggacaucguccgggcccgcugc

SEQ ID NO: 2586 - RNA, 48 nt, Artificial Sequence
  Definition of Artificial Sequence:  Enzymatic Nucleic Acid
agucccgcggaggaaacucccuucaaggacaucguccgggacccccgc

SEQ ID NO: 2587 - RNA, 48 nt, Artificial Sequence
  Definition of Artificial Sequence:  Enzymatic Nucleic Acid
accaguccggaggaaacucccuucaaggacaucguccggggccacccc

SEQ ID NO: 2588 - RNA, 48 nt, Artificial Sequence
  Definition of Artificial Sequence:  Enzymatic Nucleic Acid
caccagucggaggaaacucccuucaaggacaucguccgggcgccaccc

SEQ ID NO: 2589 - RNA, 48 nt, Artificial Sequence
  Definition of Artificial Sequence:  Enzymatic Nucleic Acid
ucaccaguggaggaaacucccuucaaggacaucguccgggccgccacc

SEQ ID NO: 2590 - RNA, 48 nt, Artificial Sequence
  Definition of Artificial Sequence:  Enzymatic Nucleic Acid
ugagucacggaggaaacucccuucaaggacaucguccgggagucccgc

SEQ ID NO: 2591 - RNA, 48 nt, Artificial Sequence
  Definition of Artificial Sequence:  Enzymatic Nucleic Acid
uucugaguggaggaaacucccuucaaggacaucguccgggaccagucc

SEQ ID NO: 2592 - RNA, 48 nt, Artificial Sequence
  Definition of Artificial Sequence:  Enzymatic Nucleic Acid
ugagccuuggaggaaacucccuucaaggacaucguccgggugagucac

SEQ ID NO: 2593 - RNA, 48 nt, Artificial Sequence
  Definition of Artificial Sequence:  Enzymatic Nucleic Acid
accugagcggaggaaacucccuucaaggacaucguccggguucugagu

SEQ ID NO: 2594 - RNA, 48 nt, Artificial Sequence
  Definition of Artificial Sequence:  Enzymatic Nucleic Acid
uagggcacggaggaaacucccuucaaggacaucguccgggugagccuu

SEQ ID NO: 2595 - RNA, 48 nt, Artificial Sequence
  Definition of Artificial Sequence:  Enzymatic Nucleic Acid
gccaggccggaggaaacucccuucaaggacaucguccgggaggggggu

SEQ ID NO: 2596 - RNA, 48 nt, Artificial Sequence
  Definition of Artificial Sequence:  Enzymatic Nucleic Acid
cgccaggcggaggaaacucccuucaaggacaucguccgggcagggggg

SEQ ID NO: 2597 - RNA, 48 nt, Artificial Sequence
  Definition of Artificial Sequence:  Enzymatic Nucleic Acid
accagcgcggaggaaacucccuucaaggacaucguccgggaggcccag

SEQ ID NO: 2598 - RNA, 48 nt, Artificial Sequence
  Definition of Artificial Sequence:  Enzymatic Nucleic Acid
cacagcacggaggaaacucccuucaaggacaucguccgggagcgccag

SEQ ID NO: 2599 - RNA, 48 nt, Artificial Sequence
  Definition of Artificial Sequence:  Enzymatic Nucleic Acid
gcacugucggaggaaacucccuucaaggacaucguccgggacagcacc

SEQ ID NO: 2600 - RNA, 48 nt, Artificial Sequence
  Definition of Artificial Sequence:  Enzymatic Nucleic Acid
agcacuguggaggaaacucccuucaaggacaucguccgggcacagcac

SEQ ID NO: 2601 - RNA, 48 nt, Artificial Sequence
  Definition of Artificial Sequence:  Enzymatic Nucleic Acid
gcagggccggaggaaacucccuucaaggacaucguccgggaagcacug

SEQ ID NO: 2602 - RNA, 48 nt, Artificial Sequence
  Definition of Artificial Sequence:  Enzymatic Nucleic Acid
agcagggcggaggaaacucccuucaaggacaucguccgggcaagcacu

SEQ ID NO: 2603 - RNA, 48 nt, Artificial Sequence
  Definition of Artificial Sequence:  Enzymatic Nucleic Acid
cuggggguggaggaaacucccuucaaggacaucguccgggagcagggc

SEQ ID NO: 2604 - RNA, 10 nt, Artificial Sequence
  Definition of Artificial Sequence:  Enzymatic Nucleic Acid
gccguuaggc

SEQ ID NO: 2605 - RNA, 47 nt, Artificial Sequence
  Definition of Artificial Sequence:  Enzymatic Nucleic Acid
  misc_feature (1)..(4): n stands for any a, g, c or u
  misc_feature (9)..(19): n stands for any a, g, c or u
  misc_feature (25)..(31): n stands for any a, g, c or u
  misc_feature (39)..(47): n stands for any a, g, c or u
nnnngaagnnnnnnnnnnnaaahannnnnnnacauuacnnnnnnnnn

SEQ ID NO: 2606 - RNA, 15 nt, Artificial Sequence
  Definition of Artificial Sequence:  Enzymatic Nucleic Acid
  misc_feature (1)..(7): n stands for any a, g, c, or u
  misc_feature (9)..(9): n stands for any a, g, c, or u
  misc_feature (13)..(15): n stands for any a, g, c, or u
nnnnnnnynghynnn

SEQ ID NO: 2607 - RNA, 15 nt, Artificial Sequence
  Definition of Artificial Sequence:  Enzymatic Nucleic Acid
  misc_feature (1)..(6): n stands for any a, g, c, or u
  misc_feature (9)..(15): n stands for any a, g, c, or u
nnnnnnuhnnnnnnn

SEQ ID NO: 2608 - RNA, 36 nt, Artificial Sequence
  Definition of Artificial Sequence:  Enzymatic Nucleic Acid
  misc_feature (1)..(7): n stands for any a, g, c, or u
  misc_feature (16)..(18): n stands for any a, g, c, or u
  misc_feature (23)..(25): n stands for any a, g, c, or u
  misc_feature (31)..(36): n stands for any a, g, c, or u
  misc_feature (1)..(8): 2'-O-methyl
  misc_feature (12)..(12): 2'-O-methyl
  misc_feature (14)..(26): 2'-O-methyl
  misc_feature (28)..(29): 2'-O-methyl
  misc_feature (31)..(36): 2'-O-methyl
  misc_feature (9)..(9): 2'-deoxy-2'-C-allyl
nnnnnnncugaugagnnngaaannncgaaannnnnn

SEQ ID NO: 2609 - RNA, 15 nt, Artificial Sequence
  Definition of Artificial Sequence:  Enzymatic Nucleic Acid
  misc_feature (1)..(6): n stands for any a, g, c, or u
  misc_feature (9)..(15): n stands for any a, g, c, or u
nnnnnnygnnnnnnn

SEQ ID NO: 2610 - RNA, 35 nt, Artificial Sequence
  Definition of Artificial Sequence:  Enzymatic Nucleic Acid
  misc_feature (1)..(7): n stands for any a, g, c, or u
  misc_feature (30)..(35): n stands for any a, g, c, or u
  misc_feature (1)..(8): 2'-O-methyl
  misc_feature (13)..(16): 2'-O-methyl
  misc_feature (18)..(35): 2'-O-methyl
  misc_feature (11)..(11): phosphorothioate 3'-internucleotide linkage
nnnnnnnugauggcaugcacuaugcgugnnnnnnn

SEQ ID NO: 2611 - RNA, 14 nt, Artificial Sequence
  Definition of Artificial Sequence:  Enzymatic Nucleic Acid
  misc_feature (1)..(5): n stands for any a, g, c, or u
  misc_feature (8)..(14): n stands for any a, g, c, or u
nnnnnchnnnnnnn

SEQ ID NO: 2612 - RNA, 35 nt, Artificial Sequence
  Definition of Artificial Sequence:  Enzymatic Nucleic Acid
  misc_feature (1)..(7): n stands for any a, g, c, or u
  misc_feature (16)..(18): n stands for any a, g, c, or u
  misc_feature (23)..(25): n stands for any a, g, c, or u
  misc_feature (31)..(35): n stands for any a, g, c, or u
  misc_feature (1)..(8): 2'-O-methyl
  misc_feature (12)..(12): 2'-O-methyl
  misc_feature (14)..(26): 2'-O-methyl
  misc_feature (28)..(29): 2'-O-methyl
  misc_feature (31)..(35): 2'-O-methyl
  misc_feature (9)..(9): 2'-deoxy-2'-C-allyl
  misc_feature (30)..(30): n stands for Inosine
nnnnnnncugaugagnnngaaannncgaannnnnn

SEQ ID NO: 2613 - RNA, 48 nt, Artificial Sequence
  Definition of Artificial Sequence:  Enzymatic Nucleic Acid
  misc_feature (1)..(8): 2'-O-methyl
  misc_feature (12)..(21): 2'-O-methyl
  misc_feature (32)..(37): 2'-O-methyl
  misc_feature (44)..(48): 2'-O-methyl
  misc_feature (9)..(10): 2'-deoxy-2'-amino
  misc_feature (22)..(26): 2'-deoxy-2'-amino
  misc_feature (38)..(40): 2'-deoxy-2'-amino
gugugcaaccggaggaaacucccuucaaggacgaaaguccgggacggg

SEQ ID NO: 2614 - RNA, 16 nt, Artificial Sequence
  Definition of Artificial Sequence:  Enzymatic Nucleic Acid
gccguggguugcacac

SEQ ID NO: 2615 - RNA, 36 nt, Artificial Sequence
  Definition of Artificial Sequence:  Enzymatic Nucleic Acid
  misc_feature (1)..(4): phosphorothioate 3'-internucleotide linkage
  misc_feature (1)..(7): 2'-O-methyl
  misc_feature (9)..(15): 2'-O-methyl
  misc_feature (19)..(19): 2'-O-methyl
  misc_feature (21)..(21): 2'-O-methyl
  misc_feature (23)..(23): 2'-O-methyl
  misc_feature (26)..(26): 2'-O-methyl
  misc_feature (28)..(35): 2'-O-methyl
  misc_feature (17)..(17): 2'-deoxy-2'-amino
  misc_feature (27)..(27): 2'-deoxy-2'-amino
  misc_feature (36)..(36): n stands for inverted deoxyabasic derivative
gugccuggccgaaaggcgagugaggucugccgcgcn

SEQ ID NO: 2616 - RNA, 15 nt, Artificial Sequence
  Definition of Artificial Sequence:  Enzymatic Nucleic Acid
gcgcggcgcaggcac

SEQ ID NO: 2617 - DNA, 16 bp, Artificial Sequence
  Definition of Artificial Sequence:  Enzymatic Nucleic Acid
rggctagctacaacga
